(19) United States
(12) Patent Application Publication
(10) Pub. No.: US 2022/0072028 A1
(43) Pub. Date: Mar. 10, 2022

(54) METHODS FOR THE TREATMENT OF TRINUCLEOTIDE REPEAT EXPANSION DISORDERS ASSOCIATED WITH MSH3 ACTIVITY

(71) Applicant: Triplet Therapeutics, Inc., Cambridge, MA (US)

(72) Inventors: Nessan Anthony BERMINGHAM, Cambridge, MA (US); Brian R. BETTENCOURT, Cambridge, MA (US); Peter Edward BIALEK, Cambridge, MA (US)

(21) Appl. No.: 17/299,186

(22) PCT Filed: Dec. 2, 2019
(86) PCT No.: PCT/US2019/064054

§ 371 Date: Jun. 2, 2021

Related U.S. Application Data
(60) Provisional application No. 62/774,791, filed on Dec. 3, 2018.
(60) Provisional application No. 62/877,142, filed on Jul. 22, 2019.

(51) Int. Cl. A61K 31/7115; C12N 15/113; A61P 25/28; A61K 31/712

(52) U.S. Cl. CPC A61K 31/7115; A61K 31/712; A61P 25/28; C12N 15/113

(57) ABSTRACT

The present disclosure features useful compositions and methods to treat trinucleotide repeat expansion disorders, e.g., in a subject in need thereof. In some aspects, the compositions and methods described herein are useful in the treatment of disorders associated with MSH3 activity.

### INCORPORATION BY REFERENCE OF SEQUENCE LISTING

[0001] The contents of the text file named “4398.008PC03_SL_ST25.txt,” which was created on Nov. 25, 2019 and is 545,271 bytes in size, is hereby incorporated by reference in its entirety.

### BACKGROUND

[0002] Trinucleotide repeat expansion disorders are genetic disorders caused by trinucleotide repeat expansions. Trinucleotide repeat expansions are a type of genetic mutation where nucleotide repeats in certain genes or introns exceed the normal, stable threshold for that gene. The trinucleotide repeats can result in defective or toxic gene products, impair RNA transcription, and/or cause toxic effects by forming toxic mRNA transcripts.

[0003] Trinucleotide repeat expansion disorders are generally categorized by the type of repeat expansion. For example, Type 1 disorders such as Huntington's disease are caused by CAG repeats which result in a series of glutamine residues known as a polyglutamine tract, Type 2 disorders are caused by heterogeneous expansions that are generally small in magnitude, and Type 3 disorders such as fragile X syndrome are characterized by large repeat expansions that are generally located outside of the protein coding region of the genes. Trinucleotide repeat expansion disorders are characterized by a wide variety of symptoms such as progressive degeneration of nerve cells that is common in the Type 1 disorders.

[0004] Subjects with a trinucleotide repeat expansion disorder or those who are considered at risk for developing a trinucleotide repeat expansion disorder have a constitutive nucleotide expansion in a gene associated with disease (i.e., the trinucleotide repeat expansion is present in the gene during embryogenesis). Constitutive trinucleotide repeat expansions can undergo expansion after embryogenesis (i.e., somatic trinucleotide repeat expansion). Both constitutive trinucleotide repeat expansion and somatic trinucleotide repeat expansion can be associated with presence of disease, age at onset of disease, and/or rate of progression of disease.

### SUMMARY OF THE DISCLOSURE

[0005] The present disclosure features useful compositions and methods to treat trinucleotide repeat expansion disorders, e.g., in a subject in need thereof. In some aspects, the compositions and methods described herein are useful in the treatment of disorders associated with MSH3 activity.

[0006] Oligonucleotides

[0007] Some aspects of this disclosure are directed to a single-stranded oligonucleotide of 10-30 linked nucleosides in length, wherein the oligonucleotide comprises a region of at least 10 contiguous nucleobases having at least 80% complementarity to an MSH3 gene. In some aspects, the disclosure is directed to a single-stranded oligonucleotide of 10-30 linked nucleosides in length, wherein the oligonucleotide comprises: (a) a DNA core sequence comprising linked deoxyribonucleosides; (b) a 5′ flanking sequence comprising linked nucleosides; and (c) a 3′ flanking sequence comprising linked nucleosides; wherein the DNA core comprises a region of at least 10 contiguous nucleobases having at least 80% complementarity to an MSH3 gene and is positioned between the 5′ flanking sequence and the 3′ flanking sequence; wherein the 5′ flanking sequence and the 3′ flanking sequence each comprises at least two linked nucleosides; and wherein at least one nucleoside of each flanking sequence comprises an alternative nucleoside.

[0008] In some aspects, the disclosure is directed to a single-stranded oligonucleotide of 10-30 linked nucleosides in length for inhibiting expression of a human MSH3 gene in a cell, wherein the oligonucleotide comprises a region of at least 10 contiguous nucleobases having at least 80% complementarity to an MSH3 gene. In some aspects, the disclosure is directed to a single-stranded oligonucleotide of 10-30 linked nucleosides in length for inhibiting expression of a human MSH3 gene in a cell, wherein the oligonucleotide comprises: (a) a DNA core comprising linked deoxyribonucleosides; (b) a 5′ flanking sequence comprising linked nucleosides; and (c) a 3′ flanking sequence comprising linked nucleosides; wherein the DNA core comprises a region of at least 10 contiguous nucleobases having at least 80% complementarity to an MSH3 gene and is positioned between the 5′ flanking sequence and the 3′ flanking sequence; wherein the 5′ flanking sequence and the 3′ flanking sequence each comprises at least two linked nucleosides; and wherein at least one nucleoside of each flanking sequence comprises an alternative nucleoside.

[0009] In some aspects, the region of at least 10 nucleobases has at least 90% complementary to an MSH3 gene. In some aspects, the region of at least 10 nucleobases has at least 95% complementary to an MSH3 gene.

[0010] In some aspects, the region of at least 10 nucleobases is complementary to an MSH3 gene corresponding to a sequence of reference mRNA NM_002439.4 at one or more of positions 155-199, 355-385, 398-496, 559-589, 676-724, 762-810, 876-903, 912-974, 984-1047, 1054-1098, 1114-1179, 1200-1227, 1294-1337, 1392-1417, 1467-1493, 1517-1630, 1665-1747, 1768-1866, 2029-2063, 2087-2199, 2262-2293, 2304-2330, 2371-2410, 2432-2458, 2494-2521, 2539-2647, 2679-2713, 2727-2753, 2767-2920, 2933-3000, 3046-3073, 31323245, 3266-3306, 3397-3484, 3528-3575, 3591-3617, 3753-3792, 3901-3936, 4074-4101, or 4281-4319 of the MSH3 gene. In some aspects, the region of at least 10 nucleobases is complementary to an MSH3 gene corresponding to a sequence of reference mRNA NM_002439.4 at one or more of positions 155-199, 359-385, 398-496, 559-589, 676-724, 762-810, 876-974, 984-1098, 1114-1179, 1200-1227, 1294-1337, 1392-1417, 1467-1493, 1517-1630, 1665-1747, 1834-1866, 2029-2056, 2093-2199, 2262-2293, 2304-2329, 2371-2410, 2433-2458, 2494-2521, 2539-2647, 2679-2713, 2727-2753, 2767-2920, 2933-3000, 3046-3072, 3132-3245, 3266-3303, 3397-3484, 3528-3575, 3591-3617, 3753-3792, 3901-3936, 4076-4101, or 4281-4319 of the MSH3 gene. In some aspects, the region of at least 10 nucleobases is complementary to an MSH3 gene corresponding to a sequence of reference mRNA NM_002439.4 at is one or more of positions 155-196, 359-385, 413-462, 559-589, 676-724, 762-810, 876-974, 984-1096, 1114-1179, 1200-1227, 1294-1337, 1467-1493, 1517-1630, 1665-1747, 1834-1866, 2029-2056, 2093-2199, 2265-2293, 2378-2410, 2433-2458, 2494-2521, 2539-2647, 2679-2712, 2727-2753, 2767-2919, 2934-3000, 3046-3071, 3144-3183, 3220-3245, 3397-3484, 3534-3575, 3591-3616, 3901-3931, or 4281-4306 of the MSH3 gene. In some aspects the region of at least 10 nucleobases is complementary to an MSH3 gene corresponding to a sequence of reference mRNA NM_002439.4 at one or more of positions 435-462, 559-584, 763-808, 876-902, 931-958, 1001-1083, 1114-1179, 1294-1337, 1544-1578, 1835-1863, 2031-2056, 2144-2169, 2543-2577, 2590-2615, 2621-2647, 2685-2711, 2769-2795, or 2816-2868 of the MSH3 gene. In some aspects, the region of at least 10 nucleobases is complementary to an MSH3 gene corresponding to a sequence of reference mRNA NM_002439.4 at one or more of positions 876-902, 930-958, 1056-1081, 1114-1139, 1154-1179, 1310-1337, 1546-1571, 1836-1862, 2141-2199, 2267-2292, 2540-2580, 2620-2647, 2686-2711, 2769-2868, 2939-2976, 3144-3169, or 3399-3424 of the MSH3 gene. In some aspects, the region of at least 10 nucleobases is complementary to an MSH3 gene corresponding to a sequence of reference mRNA NM_002439.4 at one or more of positions 984-1021, 1467-1493, 1722-1747, 1767-1802, 1833-1861, 2385-2410, 2554-2581, 2816-2845, 2861-2920, or 3151-3183 of the MSH3 gene.

[0011] In some aspects, the oligonucleotide comprises the nucleobase sequence of any one of SEQ ID NOs: 6-2545. In some aspects, the oligonucleotide comprises the nucleobase sequence of any one of SEQ ID NOs: 20, 22-29, 31-32, 77-78, 81-82, 115, 117, 130, 132-134, 144-145, 147, 167-168, 210, 212-215, 290-293, 295-296, 299-305, 309, 351-359, 361-362, 365-366, 368, 407-409, 432, 437-442, 444, 459-460, 479, 482-493, 497-498, 500-501, 503-512, 543-550, 552-560, 562, 582-585, 588-591, 603-604, 611, 613-616, 659, 661, 699-700, 702, 705-707, 724-725, 770-771, 812-816, 838-842, 845-852, 856, 883-885, 889, 893-897, 936, 940-941, 945, 948, 950, 955, 959-961, 965-968, 972-973, 999, 1007, 1016-1017, 1019, 1021-1022, 1036, 1040-1045, 1047, 1170, 1172-1173, 1211, 1216, 1222, 1235, 1240-1242, 1244-1249, 1251-1252, 1254-1259, 1268, 1316, 1318-1322, 1328-1329, 1373-1375, 1379-1383, 1386-1387, 1407-1408, 1433-1435, 1450-1451, 1454-1461, 1476-1477, 1496-1499, 1532, 1538-1541, 1565-1566, 1579, 1581-1589, 1591, 1600-1607, 1610, 1625, 1627-1629, 1631-1639, 1643, 1650-1660, 1663-1665, 1668-1675, 1713-1714, 1716-1722, 1724, 1727-1731, 1741, 1745-1747, 1751-1755, 1799-1801, 1859-1866, 1868-1869, 1894-1896, 1905-1908, 1954, 1964-1966, 1969, 2066-2070, 2075-2079, 2108, 2138, 2143-2147, 2157-2160, 2193-2194, 2299-2300, 2312-2313, 2385, 2388, 2390-2395, 2416-2418, 2460, 2462, or 2463. In some aspects, the oligonucleotide comprises the nucleobase sequence of any one of SEQ ID NOs: 20, 22, 25-29, 31-32, 81-82, 115, 130, 132-134, 144, 145, 147, 168, 210, 212-215, 290-293, 295-296, 299-305, 309, 351-359, 361-362, 365-366, 368, 407-409, 432, 437-442, 444, 459-460, 479, 482-493, 497-498, 500-501, 503-506, 508-512, 543-550, 552-560, 562, 582-585, 589-591, 603-604, 611, 613-616, 659, 661, 699-700, 702, 705-707, 724, 770-771, 812-816, 838-842, 845-852, 856, 883-885, 889, 893-897, 936, 940-941, 945, 948, 950, 955, 959-961, 965-968, 972-973, 1041-1045, 1047, 1170, 1172, 1216, 1222, 1235, 1241-1242, 1244-1249, 1251-1252, 1254-1259, 1268, 1316, 1318-1319, 1321-1322, 1328, 1373, 1379-1383, 1386-1387, 1408, 1433-1435, 1450-1451, 1454-1461, 1476-1477, 1496-1499, 1532, 1538-1541, 1565-1566, 1579, 1581-1582, 1584-1589, 1591, 1601-1607, 1610, 1625, 1627-1629, 1631-1638, 1650-1655, 1659, 1665, 1668-1675, 1713-1714, 1716-1722, 1727-1731, 1745, 1747, 1751-1755, 1799-1800, 1859, 1861-1862, 1865-1866, 1868-1869, 1895-1896, 1905-1908, 1954, 1694-1966, 2066-2070, 2075-2079, 2108, 2138, 2144-2146, 2158-2160, 2193-2194, 2299, 2300, 2313, 2385, 2388, 2390-2392, 2394-2395, 2418, 2460, or 2462-2463. In some aspects, the oligonucleotide comprises the nucleobase sequence of any one of SEQ ID NOs: 20, 25-29, 32, 81-82, 130, 133-134, 144-145, 147, 210, 212-213, 215, 290-293, 295-296, 299-304, 309, 351, 352-359, 361-362, 365-366, 368, 407-409, 432, 437-442, 444, 460, 479, 482-486, 488-492, 497-498, 500-501, 503-506, 508-512, 544-550, 553-558, 560, 582-585, 589, 603-604, 611, 613-616, 659, 661, 699-700, 702, 705-707, 770-771, 812-816, 838-842, 845-851, 856, 883, 885, 889, 893, 895-897, 936, 940, 945, 961. 965-968, 972-973, 1041-1045, 1047, 1170, 1172, 1216, 1222, 1235, 1244, 1246-1249, 1251-1252, 1254-1255, 1257-1259, 1268, 1319, 1321-1322, 1380-1381, 1386-1387, 1408, 1433-1435, 1450-1451, 1454-1461, 1476-1477, 1496-1499, 1532, 1538-1540, 1565-1566, 1579, 1581-1582, 1584-1589, 1591, 1601-1604, 1606-1607, 1610, 1625, 1627-1629, 1631-1638, 1651-1654, 1668, 1670-1674, 1714, 1717-1722, 1727-1731, 1745, 1751-1755, 1799, 1861, 1869, 1908, 1964, 1966, 2066-2069, 2075-2076, 2078-2079, 2108, 2144-2145, 2158-2160, 2193, 2385, 2390, or 2460. In some aspects, the oligonucleotide comprises the nucleobase sequence of any one of SEQ ID NOs: 145, 147, 210, 352, 365, 366, 407, 408, 439-442, 444, 492, 500, 504, 511, 512, 544-547, 582, 604, 616, 699, 700, 702, 705-707, 839-842, 848, 1042-1045, 1172, 1255, 1454-1457, 1477-1499, 1538, 1539, 1581, 1582, 1606, 1607, 1610, or 1631-1633. In some aspects, the oligonucleotide comprises the nucleobase sequence of any one of SEQ ID NOs: 407, 408, 441, 442, 444, 545, 582, 616, 705-707, 841, 1043, 1044, 1252, 1255, 1268, 1321, 1451, 1454-1460, 1497-1499, 1538, 1539, 1581, 1582, 1587, 1601, 1602, 1606, 1607, 1610, 1631-1633, 1719, 1721, 1730, 1731, 1861, or 2068. In some aspects, the oligonucleotide comprises the nucleobase sequence of any one of SEQ ID NOs: 479, 482-491, 770, 771, 973, 998-1000, 1007, 1008, 1040-1043, 1387, 1454, 1456, 1459-1461, 1538, 1539, 1606, 1607, 1610, 1643-1665, 1668-1675, or 1862-1869.

[0012] In some aspects, the nucleobase sequence of the oligonucleotide consists of any one of SEQ ID NOs: 6-2545. In some aspects, the oligonucleotide consists of the nucleobase sequence of any one of SEQ ID NOs: 20, 22-29, 31-32, 77-78, 81-82, 115, 117, 130, 132-134, 144-145, 147, 167-168, 210, 212-215, 290-293, 295-296, 299-305, 309, 351-359, 361-362, 365-366, 368, 407-409, 432, 437-442, 444, 459-460, 479, 482-493, 497-498, 500-501, 503-512, 543-550, 552-560, 562, 582-585, 588-591, 603-604, 611, 613-616, 659, 661, 699-700, 702, 705-707, 724-725, 770-771, 812-816, 838-842, 845-852, 856, 883-885, 889, 893-897, 936, 940-941, 945, 948, 950, 955, 959-961, 965-968, 972-973, 999, 1007, 1016-1017, 1019, 1021-1022, 1036, 1040-1045, 1047, 1170, 1172-1173, 1211, 1216, 1222, 1235, 1240-1242, 1244-1249, 1251-1252, 1254-1259, 1268, 1316, 1318-1322, 1328-1329, 1373-1375, 1379-1383, 1386-1387, 1407-1408, 1433-1435, 1450-1451, 1454-1461, 1476-1477, 1496-1499, 1532, 1538-1541, 1565-1566, 1579, 1581-1589, 1591, 1600-1607, 1610, 1625, 1627-1629, 1631-1639, 1643, 1650-1660, 1663-1665, 1668-1675, 1713-1714, 1716-1722, 1724, 1727-1731, 1741, 1745-1747, 1751-1755, 1799-1801, 1859-1866, 1868-1869, 1894-1896, 1905-1908, 1954, 1964-1966, 1969, 2066-2070, 2075-2079, 2108, 2138, 2143-2147, 2157-2160, 2193-2194, 2299-2300, 2312-2313, 2385, 2388, 2390-2395, 2416-2418, 2460, 2462, or 2463. In some aspects, the oligonucleotide consists of the nucleobase sequence of any one of SEQ ID NOs: 20, 22, 25-29, 31-32, 81-82, 115, 130, 132-134, 144, 145, 147, 168, 210, 212-215, 290-293, 295-296, 299-305, 309, 351-359, 361-362, 365-366, 368, 407-409, 432, 437-442, 444, 459-460, 479, 482-493, 497-498, 500-501, 503-506, 508-512, 543-550, 552-560, 562, 582-585, 589-591, 603-604, 611, 613-616, 659, 661, 699-700, 702, 705-707, 724, 770-771, 812-816, 838-842, 845-852, 856, 883-885, 889, 893-897, 936, 940-941, 945, 948, 950, 955, 959-961, 965-968, 972-973, 1041-1045, 1047, 1170, 1172, 1216, 1222, 1235, 1241-1242, 1244-1249, 1251-1252, 1254-1259, 1268, 1316, 1318-1319, 1321-1322, 1328, 1373, 1379-1383, 1386-1387, 1408, 1433-1435, 1450-1451, 1454-1461, 1476-1477, 1496-1499, 1532, 1538-1541, 1565-1566, 1579, 1581-1582, 1584-1589, 1591, 1601-1607, 1610, 1625, 1627-1629, 1631-1638, 1650-1655, 1659, 1665, 1668-1675, 1713-1714, 1716-1722, 1727-1731, 1745, 1747, 1751-1755, 1799-1800, 1859, 1861-1862, 1865-1866, 1868-1869, 1895-1896, 1905-1908, 1954, 1694-1966, 2066-2070, 2075-2079, 2108, 2138, 2144-2146, 2158-2160, 2193-2194, 2299, 2300, 2313, 2385, 2388, 2390-2392, 2394-2395, 2418, 2460, or 2462-2463. In some aspects, the oligonucleotide consists of the nucleobase sequence of any one of SEQ ID NOs: 20, 25-29, 32, 81-82, 130, 133-134, 144-145, 147, 210, 212-213, 215, 290-293, 295-296, 299-304, 309, 351, 352-359, 361-362, 365-366, 368, 407-409, 432, 437-442, 444, 460, 479, 482-486, 488-492, 497-498, 500-501, 503-506, 508-512, 544-550, 553-558, 560, 582-585, 589, 603-604, 611, 613-616, 659, 661, 699-700, 702, 705-707, 770-771, 812-816, 838-842, 845-851, 856, 883, 885, 889, 893, 895-897, 936, 940, 945, 961. 965-968, 972-973, 1041-1045, 1047, 1170, 1172, 1216, 1222, 1235, 1244, 1246-1249, 1251-1252, 1254-1255, 1257-1259, 1268, 1319, 1321-1322, 1380-1381, 1386-1387, 1408, 1433-1435, 1450-1451, 1454-1461, 1476-1477, 1496-1499, 1532, 1538-1540, 1565-1566, 1579, 1581-1582, 1584-1589, 1591, 1601-1604, 1606-1607, 1610, 1625, 1627-1629, 1631-1638, 1651-1654, 1668, 1670-1674, 1714, 1717-1722, 1727-1731, 1745, 1751-1755, 1799, 1861, 1869, 1908, 1964, 1966, 2066-2069, 2075-2076, 2078-2079, 2108, 2144-2145, 2158-2160, 2193, 2385, 2390, or 2460. In some aspects, the oligonucleotide consists of the nucleobase sequence of any one of SEQ ID NOs: 145, 147, 210, 352, 365, 366, 407, 408, 439-442, 444, 492, 500, 504, 511, 512, 544-547, 582, 604, 616, 699, 700, 702, 705-707, 839-842, 848, 1042-1045, 1172, 1255, 1454-1457, 1477-1499, 1538, 1539, 1581, 1582, 1606, 1607, 1610, or 1631-1633. In some aspects, the oligonucleotide consists of the nucleobase sequence of any one of SEQ ID NOs: 407, 408, 441, 442, 444, 545, 582, 616, 705-707, 841, 1043, 1044, 1252, 1255, 1268, 1321, 1451, 1454-1460, 1497-1499, 1538, 1539, 1581, 1582, 1587, 1601, 1602, 1606, 1607, 1610, 1631-1633, 1719, 1721, 1730, 1731, 1861, or 2068. In some aspects, the oligonucleotide consists of the nucleobase sequence of any one of SEQ ID NOs: 479, 482-491, 770, 771, 973, 998-1000, 1007, 1008, 1040-1043, 1387, 1454, 1456,1459-1461, 1538, 1539, 1606, 1607, 1610, 1643-1665, 1668-1675, or 1862-1869.

[0013] In some aspects, the oligonucleotide exhibits at least 50% mRNA inhibition at 20 nM oligonucleotide concentration when determined using a cell assay when compared with a control cell. In some aspects, the oligonucleotide exhibits at least 60% mRNA inhibition at a 20 nM oligonucleotide concentration when determined using a cell assay when compared with a control cell. In some aspects, the oligonucleotide exhibits at least 70% mRNA inhibition at a 20 nM oligonucleotide concentration when determined using a cell assay when compared with a control cell. In some aspects, the oligonucleotide exhibits at least 85% mRNA inhibition at a 20 nM oligonucleotide concentration when determined using a cell assay when compared with a control cell. In some aspects, the oligonucleotide exhibits at least 50% mRNA inhibition at 2 nM when determined using a cell assay when compared with a control cell. In some aspects, the oligonucleotide exhibits at least 60% mRNA inhibition at a 2 nM oligonucleotide concentration when determined using a cell assay when compared with a control cell. In some aspects, the oligonucleotide exhibits at least 70% mRNA inhibition at a 2 nM oligonucleotide concentration when determined using a cell assay when compared with a control cell. In some aspects, the oligonucleotide exhibits at least 85% mRNA inhibition at a 2 nM oligonucleotide concentration when determined using a cell assay when compared with a control cell.

[0014] The cell assay can comprise transfecting a mammalian cell, such as HEK293, NIH3T3, or HeLa, with oligonucleotides using Lipofectamine 2000 (Invitrogen) and measuring mRNA levels compared to a mammalian cell transfected with a mock oligonucleotide.

[0015] In some aspects, the oligonucleotide comprises at least one alternative internucleoside linkage. In some aspects, the at least one alternative internucleoside linkage is a phosphorothioate internucleoside linkage. In some aspects, the at least one alternative internucleoside linkage is a 2′-alkoxy internucleoside linkage. In some aspects, the at least one alternative internucleoside linkage is an alkyl phosphate internucleoside linkage.

[0016] In some aspects, the oligonucleotide comprises at least one alternative nucleobase. In some aspects, the alternative nucleobase is 5′-methylcytosine, pseudouridine, or 5-methoxyuridine.

[0017] In some aspects, the oligonucleotide comprises at least one alternative sugar moiety. In some aspects, the alternative sugar moiety is 2′-OMe or a bicyclic nucleic acid.

[0018] In some aspects, the oligonucleotide further comprises a ligand conjugated to the 5′ end or the 3′ end of the oligonucleotide through a monovalent or branched bivalent or trivalent linker.

[0019] In some aspects, the oligonucleotide comprises a region complementary to at least 17 contiguous nucleotides of a MSH3 gene. In some aspects, the oligonucleotide comprises a region complementary to at least 19 contiguous nucleotides of a MSH3 gene. In some aspects, the oligonucleotide comprises a region complementary to 19 to 23 contiguous nucleotides of a MSH3 gene. In some aspects, the oligonucleotide comprises a region complementary to 19 contiguous nucleotides of a MSH3 gene. In some aspects, the oligonucleotide comprises a region complementary to 20 contiguous nucleotides of a MSH3 gene. In some aspects, the oligonucleotide is from about 15 to 25 nucleosides in length. In some aspects, the oligonucleotide is 20 nucleosides in length.

[0020] Pharmaceutical Compositions and Methods of Treatment Using the Same

[0021] In some aspects, the application is directed to a pharmaceutical composition comprising one or more of the oligonucleotides described herein and a pharmaceutically acceptable carrier or excipient.

[0022] In some aspects, the application is directed to a composition comprising one or more of the oligonucleotides described herein and a lipid nanoparticle, a polyplex nanoparticle, a lipoplex nanoparticle, or a liposome.

[0023] In some aspects, the application is directed to a method of inhibiting transcription of MSH3 in a cell, the method comprising contacting the cell with one or more of the oligonucleotides described herein, a pharmaceutical composition of one or more of the oligonucleotides described herein, or the composition of one or more oligonucleotides described herein and a lipid nanoparticle, a polyplex nanoparticle, a lipoplex nanoparticle, or a liposome; for a time sufficient to obtain degradation of an mRNA transcript of a MSH3 gene, inhibiting expression of the MSH3 gene in the cell.

[0024] In some aspects, the application is directed to a method of treating, preventing, or delaying the progression a trinucleotide repeat expansion disorder in a subject in need thereof, the method comprising contacting the cell with one or more of the oligonucleotides described herein, a pharmaceutical composition of one or more of the oligonucleotides described herein, or the composition of one or more oligonucleotides described herein and a lipid nanoparticle, a polyplex nanoparticle, a lipoplex nanoparticle, or a liposome; for a time sufficient to obtain degradation of an mRNA transcript of a MSH3 gene, inhibiting expression of the MSH3 gene in the cell.

[0025] In some aspects, the application is directed to a method of reducing the level and/or activity of MSH3 in a cell of a subject identified as having a trinucleotide repeat expansion disorder, the method comprising contacting the cell with one or more of the oligonucleotides described herein, a pharmaceutical composition of one or more of the oligonucleotides described herein, or the composition of one or more oligonucleotides described herein and a lipid nanoparticle, a polyplex nanoparticle, a lipoplex nanoparticle, or a liposome, for a time sufficient to obtain degradation of an mRNA transcript of a MSH3 gene, inhibiting expression of the MSH3 gene in the cell.

[0026] In some aspects, the application is directed to a method for inhibiting expression of an MSH3 gene in a cell comprising contacting the cell with one or more of the oligonucleotides described herein, a pharmaceutical composition of one or more of the oligonucleotides described herein, or the composition of one or more oligonucleotides described herein and a lipid nanoparticle, a polyplex nanoparticle, a lipoplex nanoparticle, or a liposome; for a time sufficient to obtain degradation of an mRNA transcript of a MSH3 gene, inhibiting expression of the MSH3 gene in the cell, and maintaining the cell for a time sufficient to obtain degradation of a mRNA transcript of an MSH3 gene, thereby inhibiting expression of the MSH3 gene in the cell.

[0027] In some aspects, the application is directed to a method of decreasing trinucleotide repeat expansion in a cell, the method comprising contacting the cell with one or more of the oligonucleotides described herein, a pharmaceutical composition of one or more of the oligonucleotides described herein, or the composition of one or more oligonucleotides described herein and a lipid nanoparticle, a polyplex nanoparticle, a lipoplex nanoparticle, or a liposome; for a time sufficient to obtain degradation of an mRNA transcript of a MSH3 gene, inhibiting expression of the MSH3 gene in the cell.

[0028] In some aspects, the cell is in a subject. In some aspects, the subject is a human. In some aspects, the cell is a cell of the central nervous system or a muscle cell.

[0029] In some aspects, the subject is identified as having a trinucleotide repeat expansion disorder. In some aspects, the trinucleotide repeat expansion disorder is a polyglutamine disease. In some aspects, the polyglutamine disease is selected from the group consisting of dentatorubropallidoluysian atrophy, Huntington's disease, spinal and bulbar muscular atrophy, spinocerebellar ataxia type 1, spinocerebellar ataxia type 2, spinocerebellar ataxia type 3, spinocerebellar ataxia type 6, spinocerebellar ataxia type 7, spinocerebellar ataxia type 17, and Huntington's disease-like 2. In some aspects, the trinucleotide repeat expansion disorder is Huntington's disease.

[0030] In some aspects, the trinucleotide repeat expansion disorder is a non-polyglutamine disease. In some aspects, the non-polyglutamine disease is selected from the group consisting of fragile X syndrome, fragile X-associated tremor/ataxia syndrome, fragile XE mental retardation, Friedreich's ataxia, myotonic dystrophy type 1, spinocerebellar ataxia type 8, spinocerebellar ataxia type 12, oculopharyngeal muscular dystrophy, Fragile X-associated premature ovarian failure, FRA2A syndrome, FRA7A syndrome, and early infantile epileptic encephalopathy. In some aspects, the trinucleotide repeat expansion disorder is Friedreich's ataxia. In some aspects, the trinucleotide repeat expansion disorder is myotonic dystrophy type 1.

[0031] In some aspects, the application is directed one or more of the oligonucleotides described herein, a pharmaceutical composition of one or more of the oligonucleotides described herein, or the composition of one or more oligonucleotides described herein and a lipid nanoparticle, a polyplex nanoparticle, a lipoplex nanoparticle, or a liposome, for use in the prevention or treatment of a trinucleotide repeat expansion disorder. In some aspects, the one or more of the oligonucleotides described herein, the pharmaceutical composition of one or more of the oligonucleotides described herein, or the composition of one or more oligonucleotides described herein and a lipid nanoparticle, a polyplex nanoparticle, a lipoplex nanoparticle, or a liposome is administered intrathecally.

[0032] In some aspects, the one or more of the oligonucleotides described herein, the pharmaceutical composition of one or more of the oligonucleotides described herein, or the composition of one or more oligonucleotides described herein and a lipid nanoparticle, a polyplex nanoparticle, a lipoplex nanoparticle, or a liposome is administered intraventricularly.

[0033] In some aspects, the one or more of the oligonucleotides described herein, the pharmaceutical composition of one or more of the oligonucleotides described herein, or the composition of one or more oligonucleotides described herein and a lipid nanoparticle, a polyplex nanoparticle, a lipoplex nanoparticle, or a liposome is administered intramuscularly.

[0034] In some aspects, the application is directed to a method of treating, preventing, or delaying progression a disorder in a subject in need thereof wherein the subject is suffering from trinucleotide repeat expansion disorder, comprising administering to said subject one or more of the oligonucleotides described herein, the pharmaceutical composition of one or more of the oligonucleotides described herein, or the composition of one or more oligonucleotides described herein and a lipid nanoparticle, a polyplex nanoparticle, a lipoplex nanoparticle, or a liposome. In some aspects, the method of treating, preventing, or delaying progression of a disorder in a subject further comprises administering an additional therapeutic agent. In some aspects, the additional therapeutic agent is another oligonucleotide that hybridizes to an mRNA encoding the Huntingtin gene.

[0035] In some aspects, the method of treating, preventing, or delaying progression of a disorder in a subject progression delays progression of the trinucleotide repeat expansion disorder by at least 120 days, for example, at least 6 months, at least 12 months, at least 2 years, at least 3 years, at least 4 years, at least 5 years, at least 10 years or more, when compared with a predicted progression.

[0036] In some aspects, the application is directed to one or more of the oligonucleotides described herein, the pharmaceutical composition of one or more of the oligonucleotides described herein, or the composition of one or more oligonucleotides described herein and a lipid nanoparticle, a polyplex nanoparticle, a lipoplex nanoparticle, or a liposome for use in preventing or delaying progression of a trinucleotide repeat expansion disorder in a subject

### Definitions

[0037] For convenience, the meaning of some terms and phrases used in the specification, examples, and appended claims are provided below. Unless stated otherwise, or implicit from context, the following terms and phrases include the meanings provided below. The definitions are provided to aid in describing particular aspects, and are not intended to limit the claimed technology, because the scope of the technology is limited only by the claims. Unless otherwise defined, all technical and scientific terms used herein have the same meaning as commonly understood by one of ordinary skill in the art to which this technology belongs. If there is an apparent discrepancy between the usage of a term in the art and its definition provided herein, the definition provided within the specification shall prevail.

[0038] In this application, unless otherwise clear from context, (i) the term “a” can be understood to mean “at least one”; (ii) the term “or” can be understood to mean “and/or”; and (iii) the terms “including” and “comprising” can be understood to encompass itemized components or steps whether presented by themselves or together with one or more additional components or steps.

[0039] As used herein, the terms “about” and “approximately” refer to a value that is within 10% above or below the value being described. For example, the term “about 5 nM” indicates a range of from 4.5 to 5.5 nM.

[0040] The term “at least” prior to a number or series of numbers is understood to include the number adjacent to the term “at least”, and all subsequent numbers or integers that could logically be included, as clear from context. For example, the number of nucleotides in a nucleic acid molecule must be an integer. For example, “at least 18 nucleotides of a 21-nucleotide nucleic acid molecule” means that 18, 19, 20, or 21 nucleotides have the indicated property. When at least is present before a series of numbers or a range, it is understood that “at least” can modify each of the numbers in the series or range. “At least” is also not limited to integers (e.g., “at least 5% includes 5.0%, 5.1%, 5.18% without consideration of the number of significant figures.

[0041] As used herein, “no more than” or “less than” is understood as the value adjacent to the phrase and logical lower values or integers, as logical from context, to zero. For example, an oligonucleotide with “no more than 3 mismatches to a target sequence” has 3, 2, 1, or 0 mismatches to a target sequence. When “no more than” is present before a series of numbers or a range, it is understood that “no more than” can modify each of the numbers in the series or range.

[0042] As used herein, the term “administration” refers to the administration of a composition (e.g., a compound or a preparation that includes a compound as described herein) to a subject or system. Administration to an animal subject (e.g., to a human) can be by any appropriate route, such as one described herein.

[0043] As used herein, a “combination therapy” or “administered in combination” means that two (or more) different agents or treatments are administered to a subject as part of a defined treatment regimen for a particular disease or condition. The treatment regimen defines the doses and periodicity of administration of each agent such that the effects of the separate agents on the subject overlap. In some aspects, the delivery of the two or more agents is simultaneous or concurrent and the agents can be co-formulated. In some aspects, the two or more agents are not co-formulated and are administered in a sequential manner as part of a prescribed regimen. In some aspects, administration of two or more agents or treatments in combination is such that the reduction in a symptom, or other parameter related to the disorder is greater than what would be observed with one agent or treatment delivered alone or in the absence of the other. The effect of the two treatments can be partially additive, wholly additive, or greater than additive (e.g., synergistic). Sequential or substantially simultaneous administration of each therapeutic agent can be effected by any appropriate route including, but not limited to, oral routes, intravenous routes, intramuscular routes, and direct absorption through mucous membrane tissues. The therapeutic agents can be administered by the same route or by different routes. For example, one therapeutic agent of the combination can be administered by intravenous injection while an additional therapeutic agent of the combination can be administered orally.

[0044] As used herein, the term “MSH3” refers to MutS Homolog 3, a DNA mismatch repair protein, having an amino acid sequence from any vertebrate or mammalian source, including, but not limited to, human, bovine, chicken, rodent, mouse, rat, porcine, ovine, primate, monkey, and guinea pig, unless specified otherwise. The term also refers to fragments and variants of native MSH3 that maintain at least one in vivo or in vitro activity of a native MSH3. The term encompasses full-length unprocessed precursor forms of MSH3 as well as mature forms resulting from post-translational cleavage of the signal peptide. MSH3 is encoded by the MSH3 gene. The nucleic acid sequence of an exemplary Homo sapiens (human) MSH3 gene is set forth in NCBI Reference NM_002439.4 or in SEQ ID NO: 1. The term “MSH3” also refers to natural variants of the wild-type MSH3 protein, such as proteins having at least 85% identity (e.g., 85%, 86%, 87%, 88%, 89%, 90%, 91%, 92%, 93%, 94%, 95%, 96%, 97%, 98%, 99%, 99.9% identity, or more) to the amino acid sequence of wild-type human MSH3, which is set forth in NCBI Reference No. NP_002430.3 or in SEQ ID NO: 2. The nucleic acid sequence of an exemplary Mus musculus (mouse) MSH3 gene is set forth in NCBI Reference No. NM_010829.2 or in SEQ ID NO: 3. The nucleic acid sequence of an exemplary Rattus norvegicus (rat) MSH3 gene is set forth in NCBI Reference No. NM_001191957.1 or in SEQ ID NO: 4. The nucleic acid sequence of an exemplary Macaca fascicularis (cyno) MSH3 gene is set forth in NCBI Reference No. XM_005557283.2 or in SEQ ID NO: 5.

[0045] The term “MSH3” as used herein also refers to a particular polypeptide expressed in a cell by naturally occurring DNA sequence variations of the MSH3 gene, such as a single nucleotide polymorphism in the MSH3 gene. Numerous SNPs within the MSH3 gene have been identified and can be found at, for example, NCBI dbSNP (see, e.g., www.ncbi.nlm.nih.gov/snp). Non-limiting examples of SNPs within the MSH3 gene can be found at, NCBI dbSNP Accession Nos.: rs1650697, rs70991108, rs10168, rs26279, rs26282, rs26779, rs26784, rs32989, rs33003, rs33008, rs33013, rs40139, rs181747, rs184967, rs245346, rs245397, rs249633, rs380691, rs408626, rs442767, rs836802, rs836808, rs863221, rs1105525, rs1428030, rs1478834, rs1650694, rs1650737, rs1677626, rs1677658, rs1805355, rs2897298, rs3045983, rs3797897, rs4703819, rs6151627, rs6151640, rs6151662, rs6151670, rs6151735, rs6151838, rs7709909, rs7712332, rs10079641, rs12513549, and rs12522132.

[0046] As used herein, “target sequence” refers to a contiguous portion of the nucleotide sequence of an mRNA molecule formed during the transcription of an MSH3 gene, including mRNA that is a product of RNA processing of a primary transcription product. In one aspect, the target portion of the sequence will be at least long enough to serve as a substrate for oligonucleotide-directed (e.g., antisense oligonucleotide (ASO)-directed) cleavage at or near that portion of the nucleotide sequence of an mRNA molecule formed during the transcription of a MSH3 gene. The target sequence can be, for example, from about 9-36 nucleotides in length, e.g., about 15-30 nucleotides in length. For example, the target sequence can be 15, 16, 17, 18, 19, 20, 21, 22, 23, 24, 25, 26, 27, 28, 29, or 30 or from about 15-30 nucleotides, 15-29, 15-28, 15-27, 15-26, 15-25, 15-24, 15-23, 15-22, 15-21, 15-20, 15-19, 15-18, 15-17, 18-30, 18-29, 18-28, 18-27, 18-26, 18-25, 18-24, 18-23, 18-22, 18-21, 18-20, 19-30, 19-29, 19-28, 19-27, 19-26, 19-25, 19-24, 19-23, 19-22, 19-21, 19-20, 20-30, 20-29, 20-28, 20-27, 20-26, 20-25, 20-24, 20-23, 20-22, 20-21, 21-30, 21-29, 21-28, 21-27, 21-26, 21-25, 21-24, 21-23, or 21-22 nucleotides in length. Ranges and lengths intermediate to the above recited ranges and lengths are also contemplated. “G,” “C,” “A,” “T,” and “U” each generally stand for a naturally-occurring nucleotide that contains guanine, cytosine, adenine, thymidine, and uracil as a base, respectively. However, it will be understood that the term “nucleotide” can refer to an alternative nucleotide, as further detailed below, or a surrogate replacement moiety. The skilled person is well aware that guanine, cytosine, adenine, and uracil can be replaced by other moieties without substantially altering the base pairing properties of an oligonucleotide comprising a nucleotide bearing such replacement moiety. For example, without limitation, a nucleotide comprising inosine as its base can base pair with nucleotides containing adenine, cytosine, or uracil. Hence, nucleotides containing uracil, guanine, or adenine can be replaced in the nucleotide sequences of oligonucleotides by a nucleotide containing, for example, inosine. In another example, adenine and cytosine anywhere in the oligonucleotide can be replaced with guanine and uracil, respectively to form G-U Wobble base pairing with the target mRNA. Sequences containing such replacement moieties are suitable for the compositions and methods featured herein.

[0047] The terms “nucleobase” and “base” include the purine (e.g. adenine and guanine) and pyrimidine (e.g. uracil, thymine, and cytosine) moiety present in nucleosides and nucleotides which form hydrogen bonds in nucleic acid hybridization. The term nucleobase also encompasses alternative nucleobases which can differ from naturally-occurring nucleobases, but are functional during nucleic acid hybridization. In this context “nucleobase” refers to both naturally occurring nucleobases such as adenine, guanine, cytosine, thymidine, uracil, xanthine, and hypoxanthine, as well as alternative nucleobases. Such variants are for example described in Hirao et al (2012) Accounts of Chemical Research vol 45 page 2055 and Bergstrom (2009) Current Protocols in Nucleic Acid Chemistry Suppl. 37 1.4.1.

[0048] The term “nucleoside” refers to a monomeric unit of an oligonucleotide or a polynucleotide having a nucleobase and a sugar moiety. A nucleoside can include those that are naturally-occurring as well as alternative nucleosides, such as those described herein. The nucleobase of a nucleoside can be a naturally-occurring nucleobase or an alternative nucleobase. Similarly, the sugar moiety of a nucleoside can be a naturally-occurring sugar or an alternative sugar.

[0049] The term “alternative nucleoside” refers to a nucleoside having an alternative sugar or an alternative nucleobase, such as those described herein.

[0050] In some aspects the nucleobase moiety is modified by changing the purine or pyrimidine into a modified purine or pyrimidine, such as substituted purine or substituted pyrimidine, such as an “alternative nucleobase” selected from isocytosine, pseudoisocytosine, 5-methyl cytosine, 5-thiozolo-cytosine, 5-propynyl-cytosine, 5-propynyl-uridine, 5-bromouridine 5-thiazolo-uridine, 2-thio-uridine, pseudouridine, 1-methylpseudouridine, 5-methoxyuridine, 2′-thio-thymine, inosine, diaminopurine, 6-aminopurine, 2-aminopurine, 2,6-diaminopurine, and 2-chloro-6-aminopurine.

[0051] The nucleobase moieties can be indicated by the letter code for each corresponding nucleobase, e.g. A, T, G, C, or U, wherein each letter can include alternative nucleobases of equivalent function. In some aspects, e.g., for gapmers, 5-methyl cytosine LNA nucleosides can be used.

[0052] A “sugar” or “sugar moiety,” includes naturally occurring sugars having a furanose ring. A sugar also includes an “alternative sugar,” defined as a structure that is capable of replacing the furanose ring of a nucleoside. In some aspects, alternative sugars are non-furanose (or 4′-substituted furanose) rings or ring systems or open systems. Such structures include simple changes relative to the natural furanose ring, such as a six-membered ring, or can be more complicated as is the case with the non-ring system used in peptide nucleic acid. Alternative sugars can include sugar surrogates wherein the furanose ring has been replaced with another ring system such as, for example, a morpholino or hexitol ring system. Sugar moieties useful in the preparation of oligonucleotides having motifs include, without limitation, β-D-ribose, β-D-2′-deoxyribose, substituted sugars (such as 2′, 5′ and bis substituted sugars), 4′-S-sugars (such as 4′-S-ribose, 4′-S-2′-deoxyribose and 4′-S-2′-substituted ribose), bicyclic alternative sugars (such as the 2′-O—CH₂-4′ or 2′-O—(CH₂)₂-4′ bridged ribose derived bicyclic sugars) and sugar surrogates (such as when the ribose ring has been replaced with a morpholino or a hexitol ring system). The type of heterocyclic base and internucleoside linkage used at each position is variable and is not a factor in determining the motif. In most nucleosides having an alternative sugar moiety, the heterocyclic nucleobase is generally maintained to permit hybridization.

[0053] A “nucleotide,” as used herein, refers to a monomeric unit of an oligonucleotide or polynucleotide that comprises a nucleoside and an internucleosidic linkage. The internucleosidic linkage can include a phosphate linkage. Similarly, “linked nucleosides” can be linked by phosphate linkages. Many “alternative internucleosidic linkages” are known in the art, including, but not limited to, phosphate, phosphorothioate, and boronophosphate linkages. Alternative nucleosides include bicyclic nucleosides (BNAs) (e.g., locked nucleosides (LNAs) and constrained ethyl (cEt) nucleosides), peptide nucleosides (PNAs), phosphotriesters, phosphorothionates, phosphoramidates, and other variants of the phosphate backbone of native nucleoside, including those described herein.

[0054] An “alternative nucleotide,” as used herein, refers to a nucleotide having an alternative nucleoside or an alternative sugar, and an internucleoside linkage, which can include alternative nucleoside linkages.

[0055] The terms “oligonucleotide” and “polynucleotide,” as used herein, are defined as it is generally understood by the skilled person as a molecule comprising two or more covalently linked nucleosides. Such covalently bound nucleosides can be referred to as nucleic acid molecules or oligomers. Oligonucleotides are commonly made in the laboratory by solid-phase chemical synthesis followed by purification. When referring to a sequence of the oligonucleotide, reference is made to the sequence or order of nucleobase moieties, or modifications thereof, of the covalently linked nucleotides or nucleosides. The oligonucleotide can be man-made. For example, the oligonucleotide can be chemically synthesized, and be purified or isolated. Oligonucleotide is also intended to include (i) compounds that have one or more furanose moieties that are replaced by furanose derivatives or by any structure, cyclic or acyclic, that can be used as a point of covalent attachment for the base moiety, (ii) compounds that have one or more phosphodiester linkages that are either modified, as in the case of phosphoramidate or phosphorothioate linkages, or completely replaced by a suitable linking moiety as in the case of formacetal or riboacetal linkages, and/or (iii) compounds that have one or more linked furanose-phosphodiester linkage moieties replaced by any structure, cyclic or acyclic, that can be used as a point of covalent attachment for the base moiety. The oligonucleotide can comprise one or more alternative nucleosides or nucleotides (e.g., including those described herein). It is also understood that oligonucleotide includes compositions lacking a sugar moiety or nucleobase but are still capable of forming a pairing with or hybridizing to a target sequence.

[0056] “Oligonucleotide” refers to a short polynucleotide (e.g., of 100 or fewer linked nucleosides).

[0057] “Chimeric” oligonucleotides or “chimeras,” as used herein, are oligonucleotides which contain two or more chemically distinct regions, each made up of at least one monomer unit, i.e., a nucleotide or nucleoside in the case of an oligonucleotide. Chimeric oligonucleotides also include “gapmers.”

[0058] The oligonucleotide can be of any length that permits specific degradation of a desired target RNA through an RNase H-mediated pathway, and can range from about 10-30 nucleosides in length, e.g., about 15-30 nucleosides in length or about 18-20 nucleosides in length, for example, about 10, 11, 12, 13, 14, 15, 16, 17, 18, 19, 20, 21, 22, 23, 24, 25, 26, 27, 28, 29, or 30 nucleosides in length, such as about 15-30, 15-29, 15-28, 15-27, 15-26, 15-25, 15-24, 15-23, 15-22, 15-21, 15-20, 15-19, 15-18, 15-17, 18-30, 18-29, 18-28, 18-27, 18-26, 18-25, 18-24, 18-23, 18-22, 18-21, 18-20, 19-30, 19-29, 19-28, 19-27, 19-26, 19-25, 19-24, 19-23, 19-22, 19-21, 19-20, 20-30, 20-29, 20-28, 20-27, 20-26, 20-25, 20-24, 20-23, 20-22, 20-21, 21-30, 21-29, 21-28, 21-27, 21-26, 21-25, 21-24, 21-23, or 21-22 nucleosides in length. Ranges and lengths intermediate to the above recited ranges and lengths are also contemplated.

[0059] As used herein, the term “oligonucleotide comprising a nucleobase sequence” refers to an oligonucleotide comprising a chain of nucleotides or nucleosides that is described by the sequence referred to using the standard nucleotide nomenclature.

[0060] The term “contiguous nucleobase region” refers to the region of the oligonucleotide which is complementary to the target nucleic acid. The term can be used interchangeably herein with the term “contiguous nucleotide sequence” or “contiguous nucleobase sequence.” In some aspects all the nucleotides of the oligonucleotide are present in the contiguous nucleotide or nucleoside region. In some aspects the oligonucleotide comprises the contiguous nucleotide region and can comprise further nucleotide(s) or nucleoside(s), for example a nucleotide linker region which can be used to attach a functional group to the contiguous nucleotide sequence. The nucleotide linker region can be complementary to the target nucleic acid. In some aspects the internucleoside linkages present between the nucleotides of the contiguous nucleotide region are all phosphorothioate internucleoside linkages. In some aspects, the contiguous nucleotide region comprises one or more sugar-modified nucleosides.

[0061] The term “gapmer,” as used herein, refers to an oligonucleotide which comprises a region of RNase H recruiting oligonucleotides (gap or DNA core) which is flanked 5′ and 3′ by regions which comprise one or more affinity enhancing alternative nucleosides (wings or flanking sequence). Various gapmer designs are described herein. Headmers and tailmers are oligonucleotides capable of recruiting RNase H where one of the flanks is missing, i.e. only one of the ends of the oligonucleotide comprises affinity enhancing alternative nucleosides. For headmers the 3′ flanking sequence is missing (i.e. the 5′ flanking sequence comprises affinity enhancing alternative nucleosides) and for tailmers the 5′ flanking sequence is missing (i.e. the 3′ flanking sequence comprises affinity enhancing alternative nucleosides). A “mixed flanking sequence gapmer” refers to a gapmer wherein the flanking sequences comprise at least one alternative nucleoside, such as at least one DNA nucleoside or at least one 2′ substituted alternative nucleoside, such as, for example, 2′-O-alkyl-RNA, 2′-O-methyl-RNA, 2′-alkoxy-RNA, 2′-O-methoxyethyl-RNA (MOE), 2′-amino-DNA, 2′-Fluoro-RNA, 2′-F-ANA nucleoside(s), or bicyclic nucleosides (e.g., locked nucleosides or constrained ethyl (cEt) nucleosides). In some aspects the mixed flanking sequence gapmer has one flanking sequence which comprises alternative nucleosides (e.g. 5′ or 3′) and the other flanking sequence (3′ or 5′ respectfully) comprises 2′ substituted alternative nucleoside(s).

[0062] A “linker” or “linking group” is a connection between two atoms that links one chemical group or segment of interest to another chemical group or segment of interest via one or more covalent bonds. Conjugate moieties can be attached to the oligonucleotide directly or through a linking moiety (e.g. linker or tether). Linkers serve to covalently connect a third region, e.g. a conjugate moiety to an oligonucleotide (e.g. the termini of region A or C). In some aspects the conjugate or oligonucleotide conjugate can, comprise a linker region which is positioned between the oligonucleotide and the conjugate moiety. In some aspects, the linker between the conjugate and oligonucleotide is biocleavable. Phosphodiester containing biocleavable linkers are described in more detail in WO 2014/076195 (herein incorporated by reference).

[0063] As used herein, and unless otherwise indicated, the term “complementary,” when used to describe a first nucleotide or nucleoside sequence in relation to a second nucleotide or nucleoside sequence, refers to the ability of an oligonucleotide or polynucleotide comprising the first nucleotide or nucleoside sequence to hybridize and form a duplex structure under certain conditions with an oligonucleotide or polynucleotide comprising the second nucleotide sequence, as will be understood by the skilled person. Such conditions can, for example, be stringent conditions, where stringent conditions can include: 400 mM NaCl, 40 mM PIPES pH 6.4, 1 mM EDTA, 50° C., or 70° C., for 12-16 hours followed by washing (see, e.g., “Molecular Cloning: A Laboratory Manual, Sambrook, et al. (1989) Cold Spring Harbor Laboratory Press). Other conditions, such as physiologically relevant conditions as can be encountered inside an organism, can be used. The skilled person will be able to determine the set of conditions most appropriate for a test of complementarity of two sequences in accordance with the ultimate application of the hybridized nucleotides or nucleosides.

[0064] “Complementary” sequences, as used herein, can include, or be formed entirely from, non-Watson-Crick base pairs and/or base pairs formed from non-natural and alternative nucleotides or nucleosides, in so far as the above requirements with respect to their ability to hybridize are fulfilled. Such non-Watson-Crick base pairs include, but are not limited to, G:U Wobble or Hoogstein base pairing. Complementary sequences between an oligonucleotide and a target sequence as described herein, include base-pairing of the oligonucleotide or polynucleotide comprising a first nucleotide or nucleoside sequence to an oligonucleotide or polynucleotide comprising a second nucleotide or nucleoside sequence over the entire length of one or both nucleotide or nucleoside sequences. Such sequences can be referred to as “fully complementary” with respect to each other herein. However, where a first sequence is referred to as “substantially complementary” with respect to a second sequence herein, the two sequences can be fully complementary, or they can form one or more, but generally not more than 5, 4, 3 or 2 mismatched base pairs upon hybridization for a duplex up to 30 base pairs, while retaining the ability to hybridize under the conditions most relevant to their ultimate application, e.g., inhibition of gene expression via an RNase H-mediated pathway. “Substantially complementary” can refer to a polynucleotide that is substantially complementary to a contiguous portion of the mRNA of interest (e.g., an mRNA encoding MSH3). For example, a polynucleotide is complementary to at least a part of a MSH3 mRNA if the sequence is substantially complementary to a non-interrupted portion of an mRNA encoding MSH3.

[0065] As used herein, the term “region of complementarity” refers to the region on the oligonucleotide that is substantially complementary to all or a portion of a gene, primary transcript, a sequence (e.g., a target sequence, e.g., an MSH3 nucleotide sequence), or processed mRNA, so as to interfere with expression of the endogenous gene (e.g., MSH3). Where the region of complementarity is not fully complementary to the target sequence, the mismatches can be in the internal or terminal regions of the molecule. Generally, the most tolerated mismatches are in the terminal regions, e.g., within 5, 4, 3, or 2 nucleotides of the 5′- and/or 3′-terminus of the oligonucleotide.

[0066] As used herein, an “agent that reduces the level and/or activity of MSH3” refers to any polynucleotide agent (e.g., an oligonucleotide, e.g., an ASO) that reduces the level of or inhibits expression of MSH3 in a cell or subject. The phrase “inhibiting expression of MSH3,” as used herein, includes inhibition of expression of any MSH3 gene (such as, e.g., a mouse MSH3 gene, a rat MSH3 gene, a monkey MSH3 gene, or a human MSH3 gene) as well as variants or mutants of a MSH3 gene that encode a MSH3 protein. Thus, the MSH3 gene can be a wild-type MSH3 gene, a mutant MSH3 gene, or a transgenic MSH3 gene in the context of a genetically manipulated cell, group of cells, or organism.

[0067] By “reducing the activity of MSH3,” is meant decreasing the level of an activity related to MSH3 (e.g., by reducing the amount of trinucleotide repeats in a gene associated with a trinucleotide repeat expansion disorder that is related to MSH3 activity). The activity level of MSH3 can be measured using any method known in the art (e.g., by directly sequencing a gene associated with a trinucleotide repeat expansion disorder to measure the levels of trinucleotide repeats).

[0068] By “reducing the level of MSH3,” is meant decreasing the level of MSH3 in a cell or subject, e.g., by administering an oligonucleotide to the cell or subject. The level of MSH3 can be measured using any method known in the art (e.g., by measuring the levels of MSH3 mRNA or levels of MSH3 protein in a cell or a subject).

[0069] By “modulating the activity of a MutS6 heterodimer comprising MSH3,” is meant altering the level of an activity related to a MutS6 heterodimer, or a related downstream effect. The activity level of a MutS6 heterodimer can be measured using any method known in the art.

[0070] As used herein, the term “inhibitor” refers to any agent which reduces the level and/or activity of a protein (e.g., MSH3). Non-limiting examples of inhibitors include polynucleotides (e.g., oligonucleotide, e.g., ASOs). The term “inhibiting,” as used herein, is used interchangeably with “reducing,” “silencing,” “downregulating,” “suppressing,” and other similar terms, and includes any level of inhibition.

[0071] The phrase “contacting a cell with an oligonucleotide,” such as an oligonucleotide, as used herein, includes contacting a cell by any possible means. Contacting a cell with an oligonucleotide includes contacting a cell in vitro with the oligonucleotide or contacting a cell in vivo with the oligonucleotide. The contacting can be done directly or indirectly. Thus, for example, the oligonucleotide can be put into physical contact with the cell by the individual performing the method, or alternatively, the oligonucleotide agent can be put into a situation that will permit or cause it to subsequently come into contact with the cell.

[0072] Contacting a cell in vitro can be done, for example, by incubating the cell with the oligonucleotide. Contacting a cell in vivo can be done, for example, by injecting the oligonucleotide into or near the tissue where the cell is located, or by injecting the oligonucleotide agent into another area, e.g., the bloodstream or the subcutaneous space, such that the agent will subsequently reach the tissue where the cell to be contacted is located. For example, the oligonucleotide can contain and/or be coupled to a ligand, e.g., GaINAc3, that directs the oligonucleotide to a site of interest, e.g., the liver. Combinations of in vitro and in vivo methods of contacting are also possible. For example, a cell can be contacted in vitro with an oligonucleotide and subsequently transplanted into a subject.

[0073] In one aspect, contacting a cell with an oligonucleotide includes “introducing” or “delivering the oligonucleotide into the cell” by facilitating or effecting uptake or absorption into the cell. Absorption or uptake of an ASO can occur through unaided diffusive or active cellular processes, or by auxiliary agents or devices. Introducing an oligonucleotide into a cell can be in vitro and/or in vivo. For example, for in vivo introduction, oligonucleotides can be injected into a tissue site or administered systemically. In vitro introduction into a cell includes methods known in the art such as electroporation and lipofection. Further approaches are described herein below and/or are known in the art.

[0074] As used herein, “lipid nanoparticle” or “LNP” is a vesicle comprising a lipid layer encapsulating a pharmaceutically active molecule, such as a nucleic acid molecule, e.g., an oligonucleotide. LNP refers to a stable nucleic acid-lipid particle. LNPs typically contain a cationic lipid, a non-cationic lipid, and a lipid that prevents aggregation of the particle (e.g., a PEG-lipid conjugate). LNPs are described in, for example, U.S. Pat. Nos. 6,858,225; 6,815,432; 8,158,601; and 8,058,069, the entire contents of which are hereby incorporated herein by reference.

[0075] As used herein, the term “liposome” refers to a vesicle composed of amphiphilic lipids arranged in at least one bilayer, e.g., one bilayer or a plurality of bilayers. Liposomes include unilamellar and multilamellar vesicles that have a membrane formed from a lipophilic material and an aqueous interior. The aqueous portion contains the oligonucleotide composition. The lipophilic material isolates the aqueous interior from an aqueous exterior, which typically does not include the oligonucleotide composition, although in some examples, it can. Liposomes also include “sterically stabilized” liposomes, a term which, as used herein, refers to liposomes comprising one or more specialized lipids that, when incorporated into liposomes, result in enhanced circulation lifetimes relative to liposomes lacking such specialized lipids.

[0076] “Micelles” are defined herein as a particular type of molecular assembly in which amphipathic molecules are arranged in a spherical structure such that all the hydrophobic portions of the molecules are directed inward, leaving the hydrophilic portions in contact with the surrounding aqueous phase. The converse arrangement exists if the environment is hydrophobic.

[0077] The term “antisense,” as used herein, refers to a nucleic acid comprising an oligonucleotide or polynucleotide that is sufficiently complementary to all or a portion of a gene, primary transcript, or processed mRNA, so as to interfere with expression of the endogenous gene (e.g., MSH3). “Complementary” polynucleotides are those that are capable of base pairing according to the standard Watson-Crick complementarity rules. Specifically, purines will base pair with pyrimidines to form a combination of guanine paired with cytosine (G:C) and adenine paired with either thymine (A:T) in the case of DNA, or adenine paired with uracil (A:U) in the case of RNA. It is understood that two polynucleotides can hybridize to each other even if they are not completely complementary to each other, provided that each has at least one region that is substantially complementary to the other.

[0078] As used herein, the terms “effective amount,” “therapeutically effective amount,” and “a “sufficient amount” of an agent that reduces the level and/or activity of MSH3 (e.g., in a cell or a subject) described herein refer to a quantity sufficient to, when administered to the subject, including a human, effect beneficial or desired results, including clinical results, and, as such, an “effective amount” or synonym thereto depends on the context in which it is being applied. For example, in the context of treating a trinucleotide repeat expansion disorder, it is an amount of the agent that reduces the level and/or activity of MSH3 sufficient to achieve a treatment response as compared to the response obtained without administration of the agent that reduces the level and/or activity of MSH3. The amount of a given agent that reduces the level and/or activity of MSH3 described herein that will correspond to such an amount will vary depending upon various factors, such as the given agent, the pharmaceutical formulation, the route of administration, the type of disease or disorder, the identity of the subject (e.g., age, sex, and/or weight) or host being treated, and the like, but can nevertheless be routinely determined by one of skill in the art. Also, as used herein, a “therapeutically effective amount” of an agent that reduces the level and/or activity of MSH3 of the present disclosure is an amount which results in a beneficial or desired result in a subject as compared to a control. As defined herein, a therapeutically effective amount of an agent that reduces the level and/or activity of MSH3 of the present disclosure can be readily determined by one of ordinary skill by routine methods known in the art. Dosage regimen can be adjusted to provide the optimum therapeutic response.

[0079] “Prophylactically effective amount,” as used herein, is intended to include the amount of an oligonucleotide that, when administered to a subject having or predisposed to have a trinucleotide repeat expansion disorder, is sufficient to prevent or ameliorate the disease or one or more symptoms of the disease. Ameliorating the disease includes slowing the course of the disease or reducing the severity of later-developing disease. The “prophylactically effective amount” can vary depending on the oligonucleotide, how the agent is administered, the degree of risk of disease, and the history, age, weight, family history, genetic makeup, the types of preceding or concomitant treatments, if any, and other individual characteristics of the patient to be treated. A prophylactically effective amount can refer to, for example, an amount of the agent that reduces the level and/or activity of MSH3 (e.g., in a cell or a subject) described herein or can refer to a quantity sufficient to, when administered to the subject, including a human, delay the onset of one or more of the trinucleotide repeat disorders described herein by at least 120 days, for example, at least 6 months, at least 12 months, at least 2 years, at least 3 years, at least 4 years, at least 5 years, at least 10 years or more, when compared with the predicted onset.

[0080] A “therapeutically-effective amount” or “prophylactically effective amount” also includes an amount (either administered in a single or in multiple doses) of an oligonucleotide that produces some desired local or systemic effect at a reasonable benefit/risk ratio applicable to any treatment. Oligonucleotides employed in the methods herein can be administered in a sufficient amount to produce a reasonable benefit/risk ratio applicable to such treatment.

[0081] As used herein, the term “region of complementarity” refers to the region on the oligonucleotide that is substantially complementary to all or a portion of a gene, primary transcript, a sequence (e.g., a target sequence, e.g., an MSH3 nucleotide sequence), or processed mRNA, so as to interfere with expression of the endogenous gene (e.g., MSH3). Where the region of complementarity is not fully complementary to the target sequence, the mismatches can be in the internal or terminal regions of the molecule. Generally, the most tolerated mismatches are in the terminal regions, e.g., within 5, 4, 3, or 2 nucleotides of the 5′- and/or 3′-terminus of the oligonucleotide.

[0082] An “amount effective to reduce trinucleotide repeat expansion” of a particular gene refers to an amount of the agent that reduces the level and/or activity of MSH3 (e.g., in a cell or a subject) described herein, or to a quantity sufficient to, when administered to the subject, including a human, to reduce the trinucleotide repeat expansion of a particular gene (e.g., a gene associated with a trinucleotide repeat expansion disorder described herein).

[0083] As used herein, the term “a subject identified as having a trinucleotide repeat expansion disorder” refers to a subject identified as having a molecular or pathological state, disease or condition of or associated with a trinucleotide repeat expansion disorder, such as the identification of a trinucleotide repeat expansion disorder or symptoms thereof, or to identification of a subject having or suspected of having a trinucleotide repeat expansion disorder who can benefit from a particular treatment regimen.

[0084] As used herein, “trinucleotide repeat expansion disorder” refers to a class of genetic diseases or disorders characterized by excessive trinucleotide repeats (e.g., trinucleotide repeats such as CAG) in a gene or intron in the subject which exceed the normal, stable threshold, for the gene or intron. Nucleotide repeats are common in the human genome and are not normally associated with disease. In some cases, however, the number of repeats expands beyond a stable threshold and can lead to disease, with the severity of symptoms generally correlated with the number of repeats. Trinucleotide repeat expansion disorders include “polyglutamine” and “non-polyglutamine” disorders.

[0085] By “determining the level of a protein” is meant the detection of a protein, or an mRNA encoding the protein, by methods known in the art either directly or indirectly. “Directly determining” means performing a process (e.g., performing an assay or test on a sample or “analyzing a sample” as that term is defined herein) to obtain the physical entity or value. “Indirectly determining” refers to receiving the physical entity or value from another party or source (e.g., a third-party laboratory that directly acquired the physical entity or value). Methods to measure protein level generally include, but are not limited to, western blotting, immunoblotting, enzyme-linked immunosorbent assay (ELISA), radioimmunoassay (RIA), immunoprecipitation, immunofluorescence, surface plasmon resonance, chemiluminescence, fluorescent polarization, phosphorescence, immunohistochemical analysis, matrix-assisted laser desorption/ionization time-of-flight (MALDI-TOF) mass spectrometry, liquid chromatography (LC)-mass spectrometry, microcytometry, microscopy, fluorescence activated cell sorting (FACS), and flow cytometry, as well as assays based on a property of a protein including, but not limited to, enzymatic activity or interaction with other protein partners. Methods to measure mRNA levels are known in the art.

[0086] “Percent (%) sequence identity” with respect to a reference polynucleotide or polypeptide sequence is defined as the percentage of nucleic acids or amino acids in a candidate sequence that are identical to the nucleic acids or amino acids in the reference polynucleotide or polypeptide sequence, after aligning the sequences and introducing gaps (DNA core sequences), if necessary, to achieve the maximum percent sequence identity. Alignment for purposes of determining percent nucleic acid or amino acid sequence identity can be achieved in various ways that are within the capabilities of one of skill in the art, for example, using publicly available computer software such as BLAST, BLAST-2, or Megalign software. Those skilled in the art can determine appropriate parameters for aligning sequences, including any algorithms needed to achieve maximal alignment over the full length of the sequences being compared. For example, percent sequence identity values can be generated using the sequence comparison computer program BLAST. As an illustration, the percent sequence identity of a given nucleic acid or amino acid sequence, A, to, with, or against a given nucleic acid or amino acid sequence, B, (which can alternatively be phrased as a given nucleic acid or amino acid sequence, A that has a certain percent sequence identity to, with, or against a given nucleic acid or amino acid sequence, B) is calculated as follows:

100 multiplied by (the fraction X/Y)

where X is the number of nucleotides or amino acids scored as identical matches by a sequence alignment program (e.g., BLAST) in that program's alignment of A and B, and where Y is the total number of nucleic acids in B. It will be appreciated that where the length of nucleic acid or amino acid sequence A is not equal to the length of nucleic acid or amino acid sequence B, the percent sequence identity of A to B will not equal the percent sequence identity of B to A.

[0087] By “level” is meant a level or activity of a protein, or mRNA encoding the protein (e.g., MSH3), optionally as compared to a reference. The reference can be any useful reference, as defined herein. By a “decreased level” or an “increased level” of a protein is meant a decrease or increase in protein level, as compared to a reference (e.g., a decrease or an increase by about 5%, about 10%, about 15%, about 20%, about 25%, about 30%, about 35%, about 40%, about 45%, about 50%, about 55%, about 60%, about 65%, about 70%, about 75%, about 80%, about 85%, about 90%, about 95%, about 100%, about 150%, about 200%, about 300%, about 400%, about 500%, or more; a decrease or an increase of more than about 10%, about 15%, about 20%, about 50%, about 75%, about 100%, or about 200%, as compared to a reference; a decrease or an increase by less than about 0.01-fold, about 0.02-fold, about 0.1-fold, about 0.3-fold, about 0.5-fold, about 0.8-fold, or less; or an increase by more than about 1.2-fold, about 1.4-fold, about 1.5-fold, about 1.8-fold, about 2.0-fold, about 3.0-fold, about 3.5-fold, about 4.5-fold, about 5.0-fold, about 10-fold, about 15-fold, about 20-fold, about 30-fold, about 40-fold, about 50-fold, about 100-fold, about 1000-fold, or more). A level of a protein can be expressed in mass/vol (e.g., g/dL, mg/mL, μg/mL, or ng/mL) or percentage relative to total protein or mRNA in a sample.

[0088] The term “pharmaceutical composition,” as used herein, represents a composition containing a compound described herein formulated with a pharmaceutically acceptable excipient, and can be manufactured or sold with the approval of a governmental regulatory agency as part of a therapeutic regimen for the treatment of disease in a mammal. Pharmaceutical compositions can be formulated, for example, for oral administration in unit dosage form (e.g., a tablet, capsule, caplet, gelcap, or syrup); for topical administration (e.g., as a cream, gel, lotion, or ointment); for intravenous administration (e.g., as a sterile solution free of particulate emboli and in a solvent system suitable for intravenous use); for intrathecal injection; for intracerebroventricular injections; for intraparenchymal injection; or in any other pharmaceutically acceptable formulation.

[0089] A “pharmaceutically acceptable excipient,” as used herein, refers any ingredient other than the compounds described herein (for example, a vehicle capable of suspending or dissolving the active compound) and having the properties of being substantially nontoxic and non-inflammatory in a patient. Excipients can include, for example: antiadherents, antioxidants, binders, coatings, compression aids, disintegrants, dyes (colors), emollients, emulsifiers, fillers (diluents), film formers or coatings, flavors, fragrances, glidants (flow enhancers), lubricants, preservatives, printing inks, sorbents, suspensing or dispersing agents, sweeteners, and waters of hydration. Exemplary excipients include, but are not limited to: butylated hydroxytoluene (BHT), calcium carbonate, calcium phosphate (dibasic), calcium stearate, croscarmellose, crosslinked polyvinyl pyrrolidone, citric acid, crospovidone, cysteine, ethylcellulose, gelatin, hydroxypropyl cellulose, hydroxypropyl methylcellulose, lactose, magnesium stearate, maltitol, mannitol, methionine, methylcellulose, methyl paraben, microcrystalline cellulose, polyethylene glycol, polyvinyl pyrrolidone, povidone, pregelatinized starch, propyl paraben, retinyl palmitate, shellac, silicon dioxide, sodium carboxymethyl cellulose, sodium citrate, sodium starch glycolate, sorbitol, starch (corn), stearic acid, sucrose, talc, titanium dioxide, vitamin A, vitamin E, vitamin C, and xylitol.

[0090] As used herein, the term “pharmaceutically acceptable salt” means any pharmaceutically acceptable salt of the compound of any of the compounds described herein. For example, pharmaceutically acceptable salts of any of the compounds described herein include those that are within the scope of sound medical judgment, suitable for use in contact with the tissues of humans and animals without undue toxicity, irritation, allergic response and are commensurate with a reasonable benefit/risk ratio. Pharmaceutically acceptable salts are well known in the art. For example, pharmaceutically acceptable salts are described in: Berge et al., J. Pharmaceutical Sciences 66:1-19, 1977 and in Pharmaceutical Salts: Properties, Selection, and Use, (Eds. P. H. Stahl and C. G. Wermuth), Wiley-VCH, 2008. The salts can be prepared in situ during the final isolation and purification of the compounds described herein or separately by reacting a free base group with a suitable organic acid.

[0091] The compounds described herein can have ionizable groups so as to be capable of preparation as pharmaceutically acceptable salts. These salts can be acid addition salts involving inorganic or organic acids or the salts can, in the case of acidic forms of the compounds described herein, be prepared from inorganic or organic bases. Frequently, the compounds are prepared or used as pharmaceutically acceptable salts prepared as addition products of pharmaceutically acceptable acids or bases. Suitable pharmaceutically acceptable acids and bases and methods for preparation of the appropriate salts are well-known in the art. Salts can be prepared from pharmaceutically acceptable non-toxic acids and bases including inorganic and organic acids and bases. Representative acid addition salts include acetate, adipate, alginate, ascorbate, aspartate, benzenesulfonate, benzoate, bisulfate, borate, butyrate, camphorate, camphorsulfonate, citrate, cyclopentanepropionate, digluconate, dodecylsulfate, ethanesulfonate, fumarate, glucoheptonate, glycerophosphate, hemisulfate, heptonate, hexanoate, hydrobromide, hydrochloride, hydroiodide, 2-hydroxy-ethanesulfonate, lactobionate, lactate, laurate, lauryl sulfate, malate, maleate, malonate, methanesulfonate, 2-naphthalenesulfonate, nicotinate, nitrate, oleate, oxalate, palmitate, pamoate, pectinate, persulfate, 3-phenylpropionate, phosphate, picrate, pivalate, propionate, stearate, succinate, sulfate, tartrate, thiocyanate, toluenesulfonate, undecanoate, and valerate salts. Representative alkali or alkaline earth metal salts include sodium, lithium, potassium, calcium, and magnesium, as well as nontoxic ammonium, quaternary ammonium, and amine cations, including, but not limited to ammonium, tetramethylammonium, tetraethylammonium, methylamine, dimethylamine, trimethylamine, triethylamine, and ethylamine.

[0092] By a “reference” is meant any useful reference used to compare protein or mRNA levels or activity. The reference can be any sample, standard, standard curve, or level that is used for comparison purposes. The reference can be a normal reference sample or a reference standard or level. A “reference sample” can be, for example, a control, e.g., a predetermined negative control value such as a “normal control” or a prior sample taken from the same subject; a sample from a normal healthy subject, such as a normal cell or normal tissue; a sample (e.g., a cell or tissue) from a subject not having a disease; a sample from a subject that is diagnosed with a disease, but not yet treated with a compound described herein; a sample from a subject that has been treated by a compound described herein; or a sample of a purified protein (e.g., any described herein) at a known normal concentration. By “reference standard or level” is meant a value or number derived from a reference sample. A “normal control value” is a pre-determined value indicative of non-disease state, e.g., a value expected in a healthy control subject. Typically, a normal control value is expressed as a range (“between X and Y”), a high threshold (“no higher than X”), or a low threshold (“no lower than X”). A subject having a measured value within the normal control value for a particular biomarker is typically referred to as “within normal limits” for that biomarker. A normal reference standard or level can be a value or number derived from a normal subject not having a disease or disorder (e.g., a trinucleotide repeat expansion disorder); a subject that has been treated with a compound described herein. In some aspects, the reference sample, standard, or level is matched to the sample subject sample by at least one of the following criteria: age, weight, sex, disease stage, and overall health. A standard curve of levels of a purified protein, e.g., any described herein, within the normal reference range can be used as a reference.

[0093] As used herein, the term “subject” refers to any organism to which a composition can be administered, e.g., for experimental, diagnostic, prophylactic, and/or therapeutic purposes. Typical subjects include any animal (e.g., mammals such as mice, rats, rabbits, non-human primates, and humans). A subject can seek or be in need of treatment, require treatment, be receiving treatment, be receiving treatment in the future, or be a human or animal who is under care by a trained professional for a particular disease or condition.

[0094] As used herein, the terms “treat,” “treated,” and “treating” mean both therapeutic treatment and prophylactic or preventative measures wherein the object is to prevent or slow down (lessen) an undesired physiological condition, disorder, or disease, or obtain beneficial or desired clinical results. Beneficial or desired clinical results include, but are not limited to, alleviation of symptoms; diminishment of the extent of a condition, disorder, or disease; stabilized (i.e., not worsening) state of condition, disorder, or disease; delay in onset or slowing of condition, disorder, or disease progression; amelioration of the condition, disorder, or disease state or remission (whether partial or total), whether detectable or undetectable; an amelioration of at least one measurable physical parameter, not necessarily discernible by the patient; or enhancement or improvement of condition, disorder, or disease. Treatment includes eliciting a clinically significant response without excessive levels of side effects. Treatment also includes prolonging survival as compared to expected survival if not receiving treatment.

[0095] As used herein, the terms “variant” and “derivative” are used interchangeably and refer to naturally-occurring, synthetic, and semi-synthetic analogues of a compound, peptide, protein, or other substance described herein. A variant or derivative of a compound, peptide, protein, or other substance described herein can retain or improve upon the biological activity of the original material.

[0096] The details of one or more aspects are set forth in the description below. Other features, objects, and advantages will be apparent from the description and from the claims.

### BRIEF DESCRIPTION OF DRAWINGS

[0097] FIG. 1 is a distribution plot showing the somatic expansion of a human HTT transgene in the striatum as measured by the instability index in R6/2 mice at 4, 8, 12, and 16 weeks of age (4 male and 4 female per age group). The bars are mean values and error bars indicate standard deviation.

[0098] FIG. 2 is a distribution plot showing the somatic expansion of a human HTT transgene in the cerebellum as measured by the instability index in R6/2 mice at 4, 8, 12, and 16 weeks of age (4 male and 4 female per age group).

### DETAILED DESCRIPTION

[0099] The present inventors have found that inhibition or depletion of MSH3 level and/or activity in a cell is effective in the treatment of a trinucleotide repeat expansion disorder. Accordingly, useful compositions and methods to treat trinucleotide repeat expansion disorders, e.g., in a subject in need thereof are provided herein.

[0100] 1. Trinucleotide Repeat Expansion Disorders

[0101] Trinucleotide repeat expansion disorders are a family of genetic disorders characterized by the pathogenic expansion of a repeat region within a genomic region. In such disorders, the number of repeats exceeds that of a gene's normal, stable threshold, expanding into a diseased range.

[0102] Trinucleotide repeat expansion disorders generally can be categorized as “polyglutamine” or “non-polyglutamine.” Polyglutamine disorders, including Huntington's disease (HD) and several spinocerebellar ataxias, are caused by a CAG (glutamine) repeats in the protein-coding regions of specific genes. Non-polyglutamine disorders are more heterogeneous and can be caused by CAG trinucleotide repeat expansions in non-coding regions, as in Myotonic dystrophy, or by the expansion of trinucleotide repeats other than CAG that can be in coding or non-coding regions such as the CGG repeat expansion responsible for Fragile X Syndrome.

[0103] Trinucleotide repeat expansion disorders are dynamic in the sense that the number of repeats can vary from generation-to-generation, or even from cell-to-cell in the same individual. Repeat expansion is believed to be caused by polymerase “slipping” during DNA replication. Tandem repeats in the DNA sequence can “loop out” while maintaining complementary base pairing between the parent strand and daughter strands. If the loop structure is formed from the daughter strand, the number of repeats will increase.

[0104] Conversely, if the loop structure is formed from the parent strand, the number of repeats will decrease. It appears that expansion is more common than reduction. In general, the length of repeat expansion is negatively correlated with prognosis; longer repeats are correlated with an earlier age of onset and worsened disease severity. Thus, trinucleotide repeat expansion disorders are subject to “anticipation,” meaning the severity of symptoms and/or age of onset worsen through successive generations of affected families due to the expansion of these repeats from one generation to the next.

[0105] Trinucleotide repeat expansion disorders are well known in the art. Exemplary trinucleotide repeat expansion disorders and the trinucleotide repeats of the genes commonly associated with them are included in Table 1.

TABLE 1
Exemplary Trinucleotide Repeat Expansion Disorders

| | | Nucleotide |
|---|---|---|
| Disease | Gene | Repeat |
| ARX-nonsyndromic X-linked mental | ARX | GCG |
| retardation (XLMR) | | |
| Baratela-Scott Syndrome | XYLT1 | GGC |
| Blepharophimosis/Ptosis/Epicanthus | FOXL2 | GCG |
| inversus syndrome type II | | |
| Cleidocranial dysplasia (CCD) | RUNX2 | GCG |
| Congenital central hypoventilation | PHOX-2B | GCG |
| Congenital central hypoventilation | PHOX2B | GCG |
| syndrome (CCHS) | | |
| Creutzfeldt-Jakob disease | PRNP | |
| Dentatorubral-pallidoluysian atrophy | ATN1 | CAG |
| (DRPLA)/Haw River syndrome | | |
| Early infantile epileptic encephalopathy | ARX | GCG |
| (Ohtahara syndrome) | | |
| FRA2A syndrome | AFF3 | CGC |
| FRA7A syndrome | ZNF713 | CGG |
| Fragile X mental retardation (FRAX-E) | AFF2/FMR2 | GCC |
| Fragile X Syndrome (FXS) | FMR1 | CGG |
| Fragile X-associated Primary Ovarian | FMR1 | CGG |
| Insufficiency (FXPOI) | | |
| Fragile X-associated Tremor Ataxia | FMR1 | CGG |
| Syndrome (FXTAS) | | |
| Friedreich ataxia (FRDA) | FXN | GAA |
| Fuchs' Corneal Endothelial Dystrophy | TCF4 | CTG |
| (FECD) | | |
| Hand-foot genital syndrome (HFGS) | HOXA13 | GCG |
| Holoprosencephaly disorder (HPE) | ZIC2 | GCG |
| Huntington disease-like 2 (HDL2) | JPH3 | CTG |
| Huntington's Disease (HD) | HTT | CAG |
| Infantile spasm syndrome/West | ARX | GCG |
| syndrome (ISS) | | |
| Jacobsen syndrome | | |
| KCNN3-associated (e.g., schizophrenia) | KCNN3 | CAG |
| Multiple Skeletal dysplasias | COMP | GAC |
| Myotonic Dystrophy type 1 (DM1) | DMPK | CTG |
| Myotonic Dystrophy type 2 (DM2) | CNBP | CCTG |
| NCOA3-associated (e.g., increased risk | NCOA3 | CAG |
| of prostate cancer) | | |
| Neuronal intranuclear inclusion disease | NOTCH2NLC | GGC |
| (NIID) | | |
| Oculopharyngeal Muscular Dystrophy | PABPN1 | GCG |
| (OPMD) | | |
| Spastic ataxia - Charlevoix-Saguenay | | |
| Spinal Muscular Bulbar Atrophy (SMBA) | AR | CAG |
| Spinocerebellar ataxia type 1 (SCA1) | ATXN1 | CAG |
| Spinocerebellar ataxia type 10 (SCA10) | ATXN10 | ATTCT |
| Spinocerebellar ataxia type 12 (SCA12) | PPP2R2B | CAG |
| Spinocerebellar ataxia type 17 (SCA17) | TBP/ATXN17 | CAG |
| Spinocerebellar ataxia type 2 (SCA2) | ATXN2 | CAG |
| Spinocerebellar ataxia type 3 (SCA3)/ | ATXN3 | CAG |
| Machado-Joseph Disease | | |
| Spinocerebellar ataxia type 45 (SCA45) | FAT2 | CAG |
| Spinocerebellar ataxia type 6 (SCA6) | CACNA1A | CAG |
| Spinocerebellar ataxia type 7 (SCA7) | ATXN7 | CAG |
| Spinocerebellar ataxia type 8 (SCA8) | ATXN8 | CTG |
| Syndromic neurodevelopmental | MAB21L1 | CAG |
| disorder with cerebellar, ocular, | | |
| craniofacial, and genital features (COFG | | |
| syndrome) | | |
| Synpolydactyly (SPD I) | HOXD13 | GCG |
| Synpolydactyly (SPD II) | HOXD12 | GCG |

[0106] The proteins associated with trinucleotide repeat expansion disorders are typically selected based on an experimental association of the protein associated with a trinucleotide repeat expansion disorder to a trinucleotide repeat expansion disorder. For example, the production rate or circulating concentration of a protein associated with a trinucleotide repeat expansion disorder can be elevated or depressed in a population having a trinucleotide repeat expansion disorder relative to a population lacking the trinucleotide repeat expansion disorder. Differences in protein levels can be assessed using proteomic techniques including but not limited to Western blot, immunohistochemical staining, enzyme linked immunosorbent assay (ELISA), and mass spectrometry. Alternatively, the proteins associated with trinucleotide repeat expansion disorders can be identified by obtaining gene expression profiles of the genes encoding the proteins using genomic techniques including, but not limited to, DNA microarray analysis, serial analysis of gene expression (SAGE), and quantitative real-time polymerase chain reaction (qPCR).

[0107] II. Evidence for the Involvement of Mismatch Repair Pathway in Trinucleotide Repeat Expansion

[0108] There is growing evidence that DNA repair pathways, particularly mismatch repair (MMR), are involved in the expansion of trinucleotide repeats. A recent genome-wide association (GWA) analysis led to the identification of loci harboring genetic variations that alter the age at neurological onset of Huntington's disease (HD) (GEM-HD Consortium, Cell. 2015 Jul. 30; 162(3):516-26). The study identified MLH1, the human homolog of the E. coli DNA mismatch repair gene mutL. A subsequent GWA study in polyglutamine disease patients found significant association of age at onset when grouping all polyglutamine diseases (HD and SCAs) with DNA repair genes as a group, as well as significant associations for specific SNPs in FAN1 and PMS2 with the diseases (Bettencourt et al., (2016) Ann. Neurol., 79: 983-990). These results were consistent with those from an earlier study comparing differences in repeat expansion in two different mouse models of Huntington's Disease, which identified MIh1 and MIh3 as novel critical modifiers of CAG instability (Pinto et al., (2013) Mismatch Repair Genes MIh1 and MIh3 Modify CAG Instability in Huntington's Disease Mice: Genome-Wide and Candidate Approaches. PLoS Genet 9(10): e1003930). Another member of the mismatch repair pathway, 8-oxo-guanine glycosylase (OGG1) has also been implicated in expansion, as somatic expansion was found to be reduced in transgenic mice lacking OGG1 (Kovtun I. V. et al. (2007) Nature 447, 447-452). However, another study found that human subjects containing a Ser326Cys polymorphism in hOGG1, which results in reduced OGG1 activity, results in increased mutant huntingtin (Coppede et al., (2009) Toxicol., 278: 199-203). Likewise, complete inactivation of Fan1, another component of the DNA repair pathway, in a mouse HD model produces somatic CAG expansions (Long et al. (2018) J. Hum Genet., 103: 1-9). MSH3, another component of the mismatch repair pathway, has been reported to be linked to somatic expansion: polymorphisms in Msh3 was associated with somatic instability of the expanded CTG trinucleotide repeat in myotonic dystrophy type 1 (DM1) patients (Morales et al., (2016) DNA Repair 40: 57-66). Furthermore, natural polymorphisms in Msh3 and MIh1 have been revealed as mediators of mouse strain specific differences in CTG⋅CAG repeat instability (Pinto et al. (2013) ibid; Tome et al., (2013) PLoS Genet. 9 e1003280). Further evidence of Msh2 and Msh3's involvement in expansion repeats was reported in a study in which short hairpin RNA (shRNA) knockdown of either MSH2 or MSH3 slowed, and ectopic expression of either MSH2 or MSH3 induced GAA trinucleotide repeat expansion of the Friedreich Ataxia (FRDA) gene in fibroblasts derived from FRDA patients (Halabi et al., (2012) J. Biol. Chem. 287, 29958-29967). In spite of some inconsistent results provided above, there is strong evidence that the MMR pathway plays some role in the expansion of trinucleotide repeats in various disorders. Moreover, they are the first to recognize that the inhibition of the MMR pathway provides for the treatment or prevention of these repeat expansion disorders; however, no therapy is currently available or in development which modulates MMR for purposes of treating or preventing these repeat expansion disorders.

[0109] III. Oligonucleotide Agents

[0110] Agents described herein that reduce the level and/or activity of MSH3 in a cell can be, for example, a polynucleotide, e.g., an oligonucleotide. These agents reduce the level of an activity related to MSH3, or a related downstream effect, or reduce the level of MSH3 in a cell or subject.

[0111] In some aspects, the agent that reduces the level and/or activity of MSH3 is a polynucleotide. In some aspects, the polynucleotide is a single-stranded oligonucleotide, e.g., that acts by way of an RNase H-mediated pathway. Oligonucleotides include DNA and DNA/RNA chimeric molecules, typically about 10 to 30 nucleotides in length, which recognize polynucleotide target sequences or sequence portions through hydrogen bonding interactions with the nucleotide bases of the target sequence (e.g., MSH3). An oligonucleotide molecule can decrease the expression level (e.g., protein level or mRNA level) of MSH3. For example, an oligonucleotide includes oligonucleotides that targets full-length MSH3. In some aspects, the oligonucleotide molecule recruits an RNase H enzyme, leading to target mRNA degradation.

[0112] In some aspects, the oligonucleotide decreases the level and/or activity of a positive regulator of function. In other aspects, the oligonucleotide increases the level and/or activity of an inhibitor of a positive regulator of function. In some aspects, the oligonucleotide increases the level and/or activity of a negative regulator of function.

[0113] In some aspects, the oligonucleotide decreases the level and/or activity or function of MSH3. In some aspects, the oligonucleotide inhibits expression of MSH3. In other aspects, the oligonucleotide increases degradation of MSH3 and/or decreases the stability (i.e., half-life) of MSH3. The oligonucleotide can be chemically synthesized.

[0114] The oligonucleotide includes an oligonucleotide having a region of complementarity (e.g., a contiguous nucleobase region) which is complementary to at least a part of an mRNA formed in the expression of a MSH3 gene. The region of complementarity can be about 30 nucleotides or less in length (e.g., about 30, 29, 28, 27, 26, 25, 24, 23, 22, 21, 20, 19, or 18 nucleotides or less in length). Upon contact with a cell expressing the MSH3 gene, the oligonucleotide can inhibit the expression of the MSH3 gene (e.g., a human, a primate, a non-primate, or a bird MSH3 gene) by at least about 10% as assayed by, for example, a PCR or branched DNA (bDNA)-based method, or by a protein-based method, such as by immunofluorescence analysis, using, for example, Western Blotting or flowcytometric techniques.

[0115] Similarly, the region of complementarity to the target sequence can be between 10 and 30 linked nucleosides in length, e.g., 10, 11, 12, 13, 14, 15, 16, 17, 18, 19, 20, 21, 22, 23, 24, 25, 26, 27, 28, 29, or 30 or between 10-29, 10-28, 10-27, 10-26, 10-25, 10-24, 10-23, 10-22, 10-21, 10-20, 10-19, 10-18, 10-17, 10-16, 10-15, 10-14, 10-13, 10-12, 15-29, 15-28, 15-27, 15-26, 15-25, 15-24, 15-23, 15-22, 15-21, 15-20, 15-19, 15-18, 15-17, 18-30, 18-29, 18-28, 18-27, 18-26, 18-25, 18-24, 18-23, 18-22, 18-21, 18-20, 19-30, 19-29, 19-28, 19-27, 19-26, 19-25, 19-24, 19-23, 19-22, 19-21, 19-20, 20-30, 20-29, 20-28, 20-27, 20-26, 20-25, 20-24, 20-23, 20-22, 20-21, 21-30, 21-29, 21-28, 21-27, 21-26, 21-25, 21-24, 21-23, or 21-22 linked nucleosides in length. Ranges and lengths intermediate to the above recited ranges and lengths are also contemplated.

[0116] An oligonucleotide can be synthesized by standard methods known in the art as further discussed below, e.g., by use of an automated DNA synthesizer, such as are commercially available from, for example, Biosearch, Applied Biosystems, Inc.

[0117] The oligonucleotide compound can be prepared using solution-phase or solid-phase organic synthesis or both. Organic synthesis offers the advantage that the oligonucleotide comprising unnatural or alternative nucleotides can be easily prepared. Single-stranded oligonucleotides can be prepared using solution-phase or solid-phase organic synthesis or both.

[0118] In one aspect, an oligonucleotide includes a region of at least 10 contiguous nucleobases having at least 80% (e.g., at least 85%, at least 90%, at least 95%, or at least 99%) complementary to at least 10 contiguous nucleotides of a MSH3 gene. In some aspects, the oligonucleotide comprises a sequence complementary to at least 17 contiguous nucleotides, 19-23 contiguous nucleotides, 19 contiguous nucleotides, or 20 contiguous nucleotides of a MSH3 gene. The oligonucleotide sequence can be selected from the group of sequences provided in any one of SEQ ID NOs: 6-2545.

[0119] In one aspect, the sequence is substantially complementary to a sequence of an mRNA generated in the expression of a MSH3 gene. In some aspects, the region of at least 10 nucleobases is complementary to an MSH3 gene corresponding to a sequence of reference mRNA NM_002439.4 at one or more of positions 155-199, 355-385, 398-496, 559-589, 676-724, 762-810, 876-903, 912-974, 984-1047, 1054-1098, 1114-1179, 1200-1227, 1294-1337, 1392-1417, 1467-1493, 1517-1630, 1665-1747, 1768-1866, 2029-2063, 2087-2199, 2262-2293, 2304-2330, 2371-2410, 2432-2458, 2494-2521, 2539-2647, 2679-2713, 2727-2753, 2767-2920, 2933-3000, 3046-3073, 3132-3245, 3266-3306, 3397-3484, 3528-3575, 3591-3617, 3753-3792, 3901-3936, 4074-4101, and 4281-4319 of the MSH3 gene. In one aspect, the region of at least 10 nucleobases is complementary to an MSH3 gene corresponding to a sequence of reference mRNA NM_002439.4 at one or more of positions 155-199, 359-385, 398-496, 559-589, 676-724, 762-810, 876-974, 984-1098, 1114-1179, 1200-1227, 1294-1337, 1392-1417, 1467-1493, 1517-1630, 1665-1747, 1834-1866, 2029-2056, 2093-2199, 2262-2293, 2304-2329, 2371-2410, 2433-2458, 2494-2521, 2539-2647, 2679-2713, 2727-2753, 2767-2920, 2933-3000, 3046-3072, 3132-3245, 3266-3303, 3397-3484, 3528-3575, 3591-3617, 3753-3792, 3901-3936, 4076-4101, and 4281-4319 of the MSH3 gene. In one aspect, the region of at least 10 nucleobases is complementary to an MSH3 gene corresponding to a sequence of reference mRNA NM_002439.4 at one or more of positions 155-196, 359-385, 413-462, 559-589, 676-724, 762-810, 876-974, 984-1096, 1114-1179, 1200-1227, 1294-1337, 1467-1493, 1517-1630, 1665-1747, 1834-1866, 2029-2056, 2093-2199, 2265-2293, 2378-2410, 2433-2458, 2494-2521, 2539-2647, 2679-2712, 2727-2753, 2767-2919, 2934-3000, 3046-3071, 3144-3183, 3220-3245, 3397-3484, 3534-3575, 3591-3616, 3901-3931, and 4281-4306 of the MSH3 gene. In one aspect, the region of at least 10 nucleobases is complementary to an MSH3 gene corresponding to a sequence of reference mRNA NM_002439.4 at one or more of positions 435-462, 559-584, 763-808, 876-902, 931-958, 1001-1083, 1114-1179, 1294-1337, 1544-1578, 1835-1863, 2031-2056, 2144-2169, 2543-2577, 2590-2615, 2621-2647, 2685-2711, 2769-2795, and 2816-2868 of the MSH3 gene. In one aspect, the region of at least 10 nucleobases is complementary to an MSH3 gene corresponding to a sequence of reference mRNA NM_002439.4 at one or more of positions 876-902, 930-958, 1056-1081, 1114-1139, 1154-1179, 1310-1337, 1546-1571, 1836-1862, 2141-2199, 2267-2292, 2540-2580, 2620-2647, 2686-2711, 2769-2868, 2939-2976, 3144-3169, and 3399-3424 of the MSH3 gene. In one aspect the region of at least 10 nucleobases is complementary to an MSH3 gene corresponding to a sequence of reference mRNA NM_002439.4 at one or more of positions 984-1021, 1467-1493, 1722-1747, 1767-1802, 1833-1861, 2385-2410, 2554-2581, 2816-2845, 2861-2920, and 3151-3183 of the MSH3 gene.

[0120] In one aspect, the oligonucleotide comprises the nucleobase sequence of any one of SEQ ID NOs: 6-2545. In one aspect, the oligonucleotide comprises the nucleobase sequence of any one of SEQ ID NOs: 20, 22-29, 31-32, 77-78, 81-82, 115, 117, 130, 132-134, 144-145, 147, 167-168, 210, 212-215, 290-293, 295-296, 299-305, 309, 351-359, 361-362, 365-366, 368, 407-409, 432, 437-442, 444, 459-460, 479, 482-493, 497-498, 500-501, 503-512, 543-550, 552-560, 562, 582-585, 588-591, 603-604, 611, 613-616, 659, 661, 699-700, 702, 705-707, 724-725, 770-771, 812-816, 838-842, 845-852, 856, 883-885, 889, 893-897, 936, 940-941, 945, 948, 950, 955, 959-961, 965-968, 972-973, 999, 1007, 1016-1017, 1019, 1021-1022, 1036, 1040-1045, 1047, 1170, 1172-1173, 1211, 1216, 1222, 1235, 1240-1242, 1244-1249, 1251-1252, 1254-1259, 1268, 1316, 1318-1322, 1328-1329, 1373-1375, 1379-1383, 1386-1387, 1407-1408, 1433-1435, 1450-1451, 1454-1461, 1476-1477, 1496-1499, 1532, 1538-1541, 1565-1566, 1579, 1581-1589, 1591, 1600-1607, 1610, 1625, 1627-1629, 1631-1639, 1643, 1650-1660, 1663-1665, 1668-1675, 1713-1714, 1716-1722, 1724, 1727-1731, 1741, 1745-1747, 1751-1755, 1799-1801, 1859-1866, 1868-1869, 1894-1896, 1905-1908, 1954, 1964-1966, 1969, 2066-2070, 2075-2079, 2108, 2138, 2143-2147, 2157-2160, 2193-2194, 2299-2300, 2312-2313, 2385, 2388, 2390-2395, 2416-2418, 2460, 2462, and 2463. In one aspect, the oligonucleotide comprises the nucleobase sequence of any one of SEQ ID NOs: 20, 22, 25-29, 31-32, 81-82, 115, 130, 132-134, 144, 145, 147, 168, 210, 212-215, 290-293, 295-296, 299-305, 309, 351-359, 361-362, 365-366, 368, 407-409, 432, 437-442, 444, 459-460, 479, 482-493, 497-498, 500-501, 503-506, 508-512, 543-550, 552-560, 562, 582-585, 589-591, 603-604, 611, 613-616, 659, 661, 699-700, 702, 705-707, 724, 770-771, 812-816, 838-842, 845-852, 856, 883-885, 889, 893-897, 936, 940-941, 945, 948, 950, 955, 959-961, 965-968, 972-973, 1041-1045, 1047, 1170, 1172, 1216, 1222, 1235, 1241-1242, 1244-1249, 1251-1252, 1254-1259, 1268, 1316, 1318-1319, 1321-1322, 1328, 1373, 1379-1383, 1386-1387, 1408, 1433-1435, 1450-1451, 1454-1461, 1476-1477, 1496-1499, 1532, 1538-1541, 1565-1566, 1579, 1581-1582, 1584-1589, 1591, 1601-1607, 1610, 1625, 1627-1629, 1631-1638, 1650-1655, 1659, 1665, 1668-1675, 1713-1714, 1716-1722, 1727-1731, 1745, 1747, 1751-1755, 1799-1800, 1859, 1861-1862, 1865-1866, 1868-1869, 1895-1896, 1905-1908, 1954, 1694-1966, 2066-2070, 2075-2079, 2108, 2138, 2144-2146, 2158-2160, 2193-2194, 2299, 2300, 2313, 2385, 2388, 2390-2392, 2394-2395, 2418, 2460, and 2462- and 2463. In one aspect, the oligonucleotide comprises the nucleobase sequence of any one of SEQ ID NOs: 20, 25-29, 32, 81-82, 130, 133-134, 144-145, 147, 210, 212-213, 215, 290-293, 295-296, 299-304, 309, 351, 352-359, 361-362, 365-366, 368, 407-409, 432, 437-442, 444, 460, 479, 482-486, 488-492, 497-498, 500-501, 503-506, 508-512, 544-550, 553-558, 560, 582-585, 589, 603-604, 611, 613-616, 659, 661, 699-700, 702, 705-707, 770-771, 812-816, 838-842, 845-851, 856, 883, 885, 889, 893, 895-897, 936, 940, 945, 961. 965-968, 972-973, 1041-1045, 1047, 1170, 1172, 1216, 1222, 1235, 1244, 1246-1249, 1251-1252, 1254-1255, 1257-1259, 1268, 1319, 1321-1322, 1380-1381, 1386-1387, 1408, 1433-1435, 1450-1451, 1454-1461, 1476-1477, 1496-1499, 1532, 1538-1540, 1565-1566, 1579, 1581-1582, 1584-1589, 1591, 1601-1604, 1606-1607, 1610, 1625, 1627-1629, 1631-1638, 1651-1654, 1668, 1670-1674, 1714, 1717-1722, 1727-1731, 1745, 1751-1755, 1799, 1861, 1869, 1908, 1964, 1966, 2066-2069, 2075-2076, 2078-2079, 2108, 2144-2145, 2158-2160, 2193, 2385, 2390, and 2460. In one aspect, the oligonucleotide comprises the nucleobase sequence of any one of SEQ ID NOs: 145, 147, 210, 352, 365, 366, 407, 408, 439-442, 444, 492, 500, 504, 511, 512, 544-547, 582, 604, 616, 699, 700, 702, 705-707, 839-842, 848, 1042-1045, 1172, 1255, 1454-1457, 1477-1499, 1538, 1539, 1581, 1582, 1606, 1607, 1610, and 1631-1633. In one aspect, the oligonucleotide comprises the nucleobase sequence of any one of SEQ ID NOs: 407, 408, 441, 442, 444, 545, 582, 616, 705-707, 841, 1043, 1044, 1252, 1255, 1268, 1321, 1451, 1454-1460, 1497-1499, 1538, 1539, 1581, 1582, 1587, 1601, 1602, 1606, 1607, 1610, 1631-1633, 1719, 1721, 1730, 1731, 1861, and 2068. In one aspect, the oligonucleotide comprises the nucleobase sequence of any one of SEQ ID NOs: 479, 482-491, 770, 771, 973, 998-1000, 1007, 1008, 1040-1043, 1387, 1454, 1456, 1459-1461,1538, 1539, 1606, 1607, 1610, 1643-1665, 1668-1675, and 1862-1869

[0121] In some aspects, the nucleobase sequence of the oligonucleotide consists of any one of SEQ ID NOs: 6-2545. In one aspect, the oligonucleotide consists of the nucleobase sequence of any one of SEQ ID NOs: 20, 22-29, 31-32, 77-78, 81-82, 115, 117, 130, 132-134, 144-145, 147, 167-168, 210, 212-215, 290-293, 295-296, 299-305, 309, 351-359, 361-362, 365-366, 368, 407-409, 432, 437-442, 444, 459-460, 479, 482-493, 497-498, 500-501, 503-512, 543-550, 552-560, 562, 582-585, 588-591, 603-604, 611, 613-616, 659, 661, 699-700, 702, 705-707, 724-725, 770-771, 812-816, 838-842, 845-852, 856, 883-885, 889, 893-897, 936, 940-941, 945, 948, 950, 955, 959-961, 965-968, 972-973, 999, 1007, 1016-1017, 1019, 1021-1022, 1036, 1040-1045, 1047, 1170, 1172-1173, 1211, 1216, 1222, 1235, 1240-1242, 1244-1249, 1251-1252, 1254-1259, 1268, 1316, 1318-1322, 1328-1329, 1373-1375, 1379-1383, 1386-1387, 1407-1408, 1433-1435, 1450-1451, 1454-1461, 1476-1477, 1496-1499, 1532, 1538-1541, 1565-1566, 1579, 1581-1589, 1591, 1600-1607, 1610, 1625, 1627-1629, 1631-1639, 1643, 1650-1660, 1663-1665, 1668-1675, 1713-1714, 1716-1722, 1724, 1727-1731, 1741, 1745-1747, 1751-1755, 1799-1801, 1859-1866, 1868-1869, 1894-1896, 1905-1908, 1954, 1964-1966, 1969, 2066-2070, 2075-2079, 2108, 2138, 2143-2147, 2157-2160, 2193-2194, 2299-2300, 2312-2313, 2385, 2388, 2390-2395, 2416-2418, 2460, 2462, and 2463. In one aspect, the oligonucleotide consists of the nucleobase sequence of any one of SEQ ID NOs: 20, 22, 25-29, 31-32, 81-82, 115, 130, 132-134, 144, 145, 147, 168, 210, 212-215, 290-293, 295-296, 299-305, 309, 351-359, 361-362, 365-366, 368, 407-409, 432, 437-442, 444, 459-460, 479, 482-493, 497-498, 500-501, 503-506, 508-512, 543-550, 552-560, 562, 582-585, 589-591, 603-604, 611, 613-616, 659, 661, 699-700, 702, 705-707, 724, 770-771, 812-816, 838-842, 845-852, 856, 883-885, 889, 893-897, 936, 940-941, 945, 948, 950, 955, 959-961, 965-968, 972-973, 1041-1045, 1047, 1170, 1172, 1216, 1222, 1235, 1241-1242, 1244-1249, 1251-1252, 1254-1259, 1268, 1316, 1318-1319, 1321-1322, 1328, 1373, 1379-1383, 1386-1387, 1408, 1433-1435, 1450-1451, 1454-1461, 1476-1477, 1496-1499, 1532, 1538-1541, 1565-1566, 1579, 1581-1582, 1584-1589, 1591, 1601-1607, 1610, 1625, 1627-1629, 1631-1638, 1650-1655, 1659, 1665, 1668-1675, 1713-1714, 1716-1722, 1727-1731, 1745, 1747, 1751-1755, 1799-1800, 1859, 1861-1862, 1865-1866, 1868-1869, 1895-1896, 1905-1908, 1954, 1694-1966, 2066-2070, 2075-2079, 2108, 2138, 2144-2146, 2158-2160, 2193-2194, 2299, 2300, 2313, 2385, 2388, 2390-2392, 2394-2395, 2418, 2460, and 2462- and 2463. In one aspect, the oligonucleotide consists of the nucleobase sequence of any one of SEQ ID NOs: 20, 25-29, 32, 81-82, 130, 133-134, 144-145, 147, 210, 212-213, 215, 290-293, 295-296, 299-304, 309, 351, 352-359, 361-362, 365-366, 368, 407-409, 432, 437-442, 444, 460, 479, 482-486, 488-492, 497-498, 500-501, 503-506, 508-512, 544-550, 553-558, 560, 582-585, 589, 603-604, 611, 613-616, 659, 661, 699-700, 702, 705-707, 770-771, 812-816, 838-842, 845-851, 856, 883, 885, 889, 893, 895-897, 936, 940, 945, 961. 965-968, 972-973, 1041-1045, 1047, 1170, 1172, 1216, 1222, 1235, 1244, 1246-1249, 1251-1252, 1254-1255, 1257-1259, 1268, 1319, 1321-1322, 1380-1381, 1386-1387, 1408, 1433-1435, 1450-1451, 1454-1461, 1476-1477, 1496-1499, 1532, 1538-1540, 1565-1566, 1579, 1581-1582, 1584-1589, 1591, 1601-1604, 1606-1607, 1610, 1625, 1627-1629, 1631-1638, 1651-1654, 1668, 1670-1674, 1714, 1717-1722, 1727-1731, 1745, 1751-1755, 1799, 1861, 1869, 1908, 1964, 1966, 2066-2069, 2075-2076, 2078-2079, 2108, 2144-2145, 2158-2160, 2193, 2385, 2390, and 2460. In one aspect, the oligonucleotide consists of the nucleobase sequence of any one of SEQ ID NOs: 145, 147, 210, 352, 365, 366, 407, 408, 439-442, 444, 492, 500, 504, 511, 512, 544-547, 582, 604, 616, 699, 700, 702, 705-707, 839-842, 848, 1042-1045, 1172, 1255, 1454-1457, 1477-1499, 1538, 1539, 1581, 1582, 1606, 1607, 1610, and 1631-1633. In one aspect, the oligonucleotide consists of the nucleobase sequence of any one of SEQ ID NOs: 407, 408, 441, 442, 444, 545, 582, 616, 705-707, 841, 1043, 1044, 1252, 1255, 1268, 1321, 1451, 1454-1460, 1497-1499, 1538, 1539, 1581, 1582, 1587, 1601, 1602, 1606, 1607, 1610, 1631-1633, 1719, 1721, 1730, 1731, 1861, and 2068. In one aspect, the oligonucleotide consists of the nucleobase sequence of any one of SEQ ID NOs: 479, 482-491, 770, 771, 973, 998-1000, 1007, 1008, 1040-1043, 1387, 1454, 1456, 1459-1461, 1538, 1539, 1606, 1607, 1610, 1643-1665, 1668-1675, and 1862-1869.

[0122] In one aspect, the oligonucleotide exhibits at least 50% mRNA inhibition at 20 nM when determined using a cell assay when compared with a control cell. In one aspect, the oligonucleotide exhibits at least 60% mRNA inhibition at a 20 nM oligonucleotide concentration when determined using a cell assay when compared with a control cell. In one aspect, the oligonucleotide exhibits at least 70% mRNA inhibition at a 20 nM oligonucleotide concentration when determined using a cell assay when compared with a control cell. In one aspect, the oligonucleotide exhibits at least 85% mRNA inhibition at a 20 nM oligonucleotide concentration when determined using a cell assay when compared with a control cell. In one aspect, the oligonucleotide exhibits at least 50% mRNA inhibition at 2 nM when determined using a cell assay when compared with a control cell. In one aspect, the oligonucleotide exhibits at least 60% mRNA inhibition at a 2 nM oligonucleotide concentration when determined using a cell assay when compared with a control cell. In one aspect, the oligonucleotide exhibits at least 70% mRNA inhibition at a 2 nM oligonucleotide concentration when determined using a cell assay when compared with a control cell. In one aspect, the oligonucleotide exhibits at least 85% mRNA inhibition at a 2 nM oligonucleotide concentration when determined using a cell assay when compared with a control cell.

[0123] The cell assay can comprise transfecting mammalian cells, such as HEK293, NIH3T3, or HeLa cells, with the desired a concentration of oligonucleotide (e.g., 2 nM or 20 nM) using Lipofectamine 2000 (Invitrogen) and comparing MSH3 mRNA levels of transfected cells to MSH3 levels of control cells. Control cells can be transfected with oligonucleotides not specific to MSH3 or mock transfected. mRNA levels can be determined using RT-qPCR and MSH3 mRNA levels can be normalized to GAPDH mRNA levels. The percent inhibition can be calculated as the percent of MSH3 mRNA concentration relative to the MSH3 concentration of the control cells.

[0124] In some aspects the oligonucleotide, or contiguous nucleotide region thereof, has a gapmer design or structure also referred herein merely as “gapmer.” In a gapmer structure the oligonucleotide comprises at least three distinct structural regions a 5′-flanking sequence (also known as a 5′-wing), a DNA core sequence (also known as a gap) and a 3′-flanking sequence (also known as a 3′-wing), in ‘5->3’ orientation. In this design, the 5′ and 3′ flanking sequences comprise at least one alternative nucleoside which is adjacent to a DNA core sequence, and can, in some aspects, comprise a contiguous stretch of 2-7 alternative nucleosides, or a contiguous stretch of alternative and DNA nucleosides (mixed flanking sequences comprising both alternative and DNA nucleosides).

[0125] The length of the 5′-flanking sequence region can be at least two nucleosides in length (e.g., at least at least 2, at least 3, at least 4, at least 5, or more nucleosides in length). The length of the 3′-flanking sequence region can be at least two nucleosides in length (e.g., at least 2, at least 3, at least at least 4, at least 5, or more nucleosides in length). The 5′ and 3′ flanking sequences can be symmetrical or asymmetrical with respect to the number of nucleosides they comprise. In some aspects, the DNA core sequence comprises about 10 nucleosides flanked by a 5′ and a 3′ flanking sequence each comprising about 5 nucleosides, also referred to as a 5-10-5 gapmer.

[0126] Consequently, the nucleosides of the 5′ flanking sequence and the 3′ flanking sequence which are adjacent to the DNA core sequence are alternative nucleosides, such as 2′ alternative nucleosides. The DNA core sequence comprises a contiguous stretch of nucleotides which are capable of recruiting RNase H, when the oligonucleotide is in duplex with the MSH3 target nucleic acid. In some aspects, the DNA core sequence comprises a contiguous stretch of 5-16 DNA nucleosides. In other aspects, the DNA core sequence comprises a region of at least 10 contiguous nucleobases having at least 80% (e.g., at least 85%, at least 90%, at least 95%, or at least 99%) complementarity to an MSH3 gene. In some aspects, the gapmer comprises a region complementary to at least 17 contiguous nucleotides, 19-23 contiguous nucleotides, or 19 contiguous nucleotides of a MSH3 gene. The gapmer is complementary to the MSH3 target nucleic acid, and can therefore be the contiguous nucleoside region of the oligonucleotide.

[0127] The 5′ and 3′ flanking sequences, flanking the 5′ and 3′ ends of the DNA core sequence, can comprise one or more affinity enhancing alternative nucleosides. In some aspects, the 5′ and/or 3′ flanking sequence comprises at least one 2′-O-methoxyethyl (MOE) nucleoside. In some aspects, the 5′ and/or 3′ flanking sequences, contain at least two MOE nucleosides. In some aspects, the 5′ flanking sequence comprises at least one MOE nucleoside. In some aspects both the 5′ and 3′ flanking sequence comprise a MOE nucleoside. In some aspects, all the nucleosides in the flanking sequences are MOE nucleosides. In other aspects, the flanking sequence can comprise both MOE nucleosides and other nucleosides (mixed flanking sequence), such as DNA nucleosides and/or non-MOE alternative nucleosides, such as bicyclic nucleosides (BNAs) (e.g., LNA nucleosides or cET nucleosides), or other 2′ substituted nucleosides. In this case the DNA core sequence is defined as a contiguous sequence of at least 5 RNase H recruiting nucleosides (such as 5-16 DNA nucleosides) flanked at the 5′ and 3′ end by an affinity enhancing alternative nucleoside, such as an MOE nucleoside.

[0128] In other aspects, the 5′ and/or 3′ flanking sequence comprises at least one BNA (e.g., at least one LNA nucleoside or cET nucleoside). In some aspects, 5′ and/or 3′ flanking sequence comprises at least 2 bicyclic nucleosides. In some aspects, the 5′ flanking sequence comprises at least one BNA. In some aspects both the 5′ and 3′ flanking sequence comprise a BNA. In some aspects, all the nucleosides in the flanking sequences are BNAs. In other aspects, the flanking sequence can comprise both BNAs and other nucleosides (mixed flanking sequences), such as DNA nucleosides and/or non-BNA alternative nucleosides, such as 2′ substituted nucleosides. In this case the DNA core sequence is defined as a contiguous sequence of at least five RNase H recruiting nucleosides (such as 5-16 DNA nucleosides) flanked at the 5′ and 3′ end by an affinity enhancing alternative nucleoside, such as a BNA, such as an LNA, such as beta-D-oxy-LNA.

[0129] The 5′ flank attached to the 5′ end of the DNA core sequence comprises, contains, or consists of at least one alternative sugar moiety (e.g., at least three, at least four, at least five, at least six, at least seven, or more alternative sugar moieties). In some aspects, the flanking sequence comprises or consists of from 1 to 7 alternative nucleobases, such as from 2 to 6 alternative nucleobases, such as from 2 to 5 alternative nucleobases, such as from 2 to 4 alternative nucleobases, such as from 1 to 3 alternative nucleobases, such as one, two, three or four alternative nucleobases. In some aspects, the flanking sequence comprises or consists of at least one alternative internucleoside linkage (e.g., at least three, at least four, at least five, at least six, at least seven, or more alternative internucleoside linkages).

[0130] The 3′ flank attached to the 3′ end of the DNA core sequence comprises, contains, or consists of at least one alternative sugar moiety (e.g., at least three, at least four, at least five, at least six, at least seven, or more alternative sugar moieties). In some aspects, the flanking sequence comprises or consists of from 1 to 7 alternative nucleobases, such as from 2 to 6 alternative nucleobases, such as from 2 to 5 alternative nucleobases, such as from 2 to 4 alternative nucleobases, such as from 1 to 3 alternative nucleobases, such as one, two, three, or four alternative nucleobases. In some aspects, the flanking sequence comprises or consists of at least one alternative internucleoside linkage (e.g., at least three, at least four, at least five, at least six, at least seven, or more alternative internucleoside linkages).

[0131] In an aspect, one or more or all of the alternative sugar moieties in the flanking sequence are 2′ alternative sugar moieties.

[0132] In a further aspect, one or more of the 2′ alternative sugar moieties in the wing regions are selected from 2′-O-alkyl-sugar moieties, 2′-O-methyl-sugar moieties, 2′-amino-sugar moieties, 2′-fluoro-sugar moieties, 2′-alkoxy-sugar moieties, MOE sugar moieties, LNA sugar moieties, arabino nucleic acid (ANA) sugar moieties, and 2′-fluoro-ANA sugar moieties.

[0133] In one aspect, all the alternative nucleosides in the flanking sequences are bicyclic nucleosides. In a further aspect, the bicyclic nucleosides in the flanking sequences are independently selected from the group consisting of oxy-LNA, thio-LNA, amino-LNA, cET, and/or ENA, in either the beta-D or alpha-L configurations or combinations thereof.

[0134] In some aspects, the one or more alternative internucleoside linkages in the flanking sequences are phosphorothioate internucleoside linkages. In some aspects, the phosphorothioate linkages are stereochemically pure phosphorothioate linkages. In some aspects, the phosphorothioate linkages are Sp phosphorothioate linkages. In other aspects, the phosphorothioate linkages are Rp phosphorothioate linkages. In some aspects, the alternative internucleoside linkages are 2′-alkoxy internucleoside linkages. In other aspects, the alternative internucleoside linkages are alkyl phosphate internucleoside linkages.

[0135] The DNA core sequence can comprise, contain, or consist of at least 5-16 consecutive DNA nucleosides capable of recruiting RNase H. In some aspects, all of the nucleosides of the DNA core sequence are DNA units. In further aspects, the DNA core region can consist of a mixture of DNA and other nucleosides capable of mediating RNase H cleavage. In some aspects, at least 50% of the nucleosides of the DNA core sequence are DNA, such as at least 60%, at least 70% or at least 80%, or at least 90% DNA. In some aspects, all of the nucleosides of the DNA core sequence are RNA units.

[0136] The oligonucleotide comprises a contiguous region which is complementary to the target nucleic acid. In some aspects, the oligonucleotide can further comprise additional linked nucleosides positioned 5′ and/or 3′ to either the 5′ and 3′ flanking sequences. These additional linked nucleosides can be attached to the 5′ end of the 5′ flanking sequence or the 3′ end of the 3′ flanking sequence, respectively. The additional nucleosides can, in some aspects, form part of the contiguous sequence which is complementary to the target nucleic acid, or in other aspects, can be non-complementary to the target nucleic acid.

[0137] The inclusion of the additional nucleosides at either, or both of the 5′ and 3′ flanking sequences can independently comprise one, two, three, four, or five additional nucleotides, which can be complementary or non-complementary to the target nucleic acid. In this respect the oligonucleotide, can in some aspects comprise a contiguous sequence capable of modulating the target which is flanked at the 5′ and/or 3′ end by additional nucleotides. Such additional nucleosides can serve as a nuclease susceptible biocleavable linker, and can therefore be used to attach a functional group such as a conjugate moiety to the oligonucleotide. In some aspects, the additional 5′ and/or 3′ end nucleosides are linked with phosphodiester linkages, and can be DNA or RNA. In another aspect, the additional 5′ and/or 3′ end nucleosides are alternative nucleosides which can for example be included to enhance nuclease stability or for ease of synthesis.

[0138] In other aspects, the oligonucleotides utilize “altimer” design and comprise alternating 2′-fluoro-ANA and DNA regions that are alternated every three nucleosides. Altimer oligonucleotides are discussed in more detail in Min, et al., Bioorganic & Medicinal Chemistry Letters, 2002, 12(18): 2651-2654 and Kalota, et al., Nuc. Acid Res. 2006, 34(2): 451-61 (herein incorporated by reference).

[0139] In other aspects, the oligonucleotides utilize “hemimer” design and comprise a single 2′-modified flanking sequence adjacent to (on either side of the 5′ or the 3′ side of) a DNA core sequence. Hemimer oligonucleotides are discussed in more detail in Geary et al., 2001, J. Pharm. Exp. Therap., 296: 898-904 (herein incorporated by reference).

[0140] In some aspects, an oligonucleotide has a nucleic acid sequence with at least 50% (e.g., at least 50%, at least 60%, at least 70%, at least 80%, at least 85%, at least 90%, at least 95%, at least 96%, at least 97%, at least 98%, at least 99%, or 100%) sequence identity to the nucleic acid sequence of any one of SEQ ID NOs: 6-2545. In some aspects, an oligonucleotide has a nucleic acid sequence with at least 85% sequence identity to the nucleic acid sequence of any one of SEQ ID NOs: 6-2545.

[0141] It will be understood that, although the sequences in SEQ ID NOs: 6-2545 are described as unmodified and/or un-conjugated sequences, the nucleosides of the oligonucleotide e.g., an oligonucleotide, can comprise any one of the sequences set forth in any one of SEQ ID NOs: 6-2545 that is an alternative nucleoside and/or conjugated as described in detail below.

[0142] The skilled person is well aware that oligonucleotides having a structure of between about 18-20 base pairs can be particularly effective in inducing RNase H-mediated degradation. However, one can appreciate that shorter or longer oligonucleotides can be effective. In the aspects described above, by virtue of the nature of the oligonucleotide sequences provided herein, oligonucleotides described herein can include shorter or longer oligonucleotide sequences. It can be reasonably expected that shorter oligonucleotides minus only a few linked nucleosides on one or both ends can be similarly effective as compared to the oligonucleotides described above. Hence, oligonucleotides having a sequence of at least 8, 9, 10, 11, 12, 13, 14, 15, 16, 17, 18, 19, 20, or more contiguous linked nucleosides derived from one of the sequences provided herein, and differing in their ability to inhibit the expression of a MSH3 gene by not more than about 5, 10, 15, 20, 25, or 30% inhibition from an oligonucleotide comprising the full sequence, are contemplated to be within the scope.

[0143] The oligonucleotides described herein can function via nuclease mediated degradation of the target nucleic acid, where the oligonucleotides are capable of recruiting a nuclease, such as an endonuclease like endoribonuclease (RNase) (e.g., RNase H). Examples of oligonucleotide designs which operate via nuclease mediated mechanisms are oligonucleotides which typically comprise a region of at least 5 or 6 DNA nucleosides and are flanked on one side or both sides by affinity enhancing alternative nucleosides, for example gapmers, headmers, and tailmers.

[0144] The RNase H activity of an oligonucleotide refers to its ability to recruit RNase H when in a duplex with a complementary RNA molecule. WO01/23613 provides in vitro methods for determining RNase H activity, which can be used to determine the ability to recruit RNase H. Typically an oligonucleotide is deemed capable of recruiting RNase H if it, when provided with a complementary target nucleic acid sequence, has an initial rate, as measured in pmol/l/min, of at least 5%, such as at least 10% or more than 20% of the of the initial rate determined when using an oligonucleotide having the same base sequence as the modified oligonucleotide being tested, but containing only DNA monomers, with phosphorothioate linkages between all monomers in the oligonucleotide, and using the methodology provided by Example 91-95 of WO01/23613 (hereby incorporated by reference).

[0145] Furthermore, the oligonucleotides described herein identify a site(s) in a MSH3 transcript that is susceptible to RNase H-mediated cleavage. As used herein, an oligonucleotide is said to target within a particular site of an RNA transcript if the oligonucleotide promotes cleavage of the transcript anywhere within that particular site. Such an oligonucleotide will generally include at least about 5-10 contiguous linked nucleosides from one of the sequences provided herein coupled to additional linked nucleoside sequences taken from the region contiguous to the selected sequence in a MSH3 gene.

[0146] Inhibitory oligonucleotides can be designed by methods well known in the art. While a target sequence is generally about 10-30 linked nucleosides in length, there is wide variation in the suitability of particular sequences in this range for directing cleavage of any given target RNA.

[0147] Oligonucleotides with homology sufficient to provide sequence specificity required to uniquely degrade any RNA can be designed using programs known in the art

[0148] Systematic testing of several designed species for optimization of the inhibitory oligonucleotide sequence can be undertaken in accordance with the teachings provided herein. Considerations when designing interfering oligonucleotides include, but are not limited to, biophysical, thermodynamic, and structural considerations, base preferences at specific positions, and homology. The making and use of inhibitory therapeutic agents based on non-coding oligonucleotides are also known in the art.

[0149] Various software packages and the guidelines set out herein provide guidance for the identification of optimal target sequences for any given gene target, but an empirical approach can be taken in which a “window” or “mask” of a given size (as a non-limiting example, 21 nucleotides) is literally or figuratively (including, e.g., in silico) placed on the target RNA sequence to identify sequences in the size range that can serve as target sequences. By moving the sequence “window” progressively one nucleotide upstream or downstream of an initial target sequence location, the next potential target sequence can be identified, until the complete set of possible sequences is identified for any given target size selected. This process, coupled with systematic synthesis and testing of the identified sequences (using assays as described herein or as known in the art) to identify those sequences that perform optimally can identify those RNA sequences that, when targeted with an oligonucleotide agent, mediate the best inhibition of target gene expression. Thus, while the sequences identified herein represent effective target sequences, it is contemplated that further optimization of inhibition efficiency can be achieved by progressively “walking the window” one nucleotide upstream or downstream of the given sequences to identify sequences with equal or better inhibition characteristics.

[0150] Further, it is contemplated that for any sequence identified herein, further optimization could be achieved by systematically either adding or removing linked nucleosides to generate longer or shorter sequences and testing those sequences generated by walking a window of the longer or shorter size up or down the target RNA from that point. Again, coupling this approach to generating new candidate targets with testing for effectiveness of oligonucleotides based on those target sequences in an inhibition assay as known in the art and/or as described herein can lead to further improvements in the efficiency of inhibition.

[0151] Further still, such optimized sequences can be adjusted by, e.g., the introduction of alternative nucleosides, alternative sugar moieties, and/or alternative internucleosidic linkages as described herein or as known in the art, including alternative nucleosides, alternative sugar moieties, and/or alternative internucleosidic linkages as known in the art and/or discussed herein to further optimize the molecule (e.g., increasing serum stability or circulating half-life, increasing thermal stability, enhancing transmembrane delivery, targeting to a particular location or cell type, increasing interaction with silencing pathway enzymes, increasing release from endosomes) as an expression inhibitor. An oligonucleotide agent as described herein can contain one or more mismatches to the target sequence. In one aspect, an oligonucleotide as described herein contains no more than 3 mismatches. If the oligonucleotide contains mismatches to a target sequence, in some aspects, the area of mismatch is not located in the center of the region of complementarity. If the oligonucleotide contains mismatches to the target sequence, in some aspects, the mismatch should be restricted to be within the last 5 nucleotides from either the 5′- or 3′-end of the region of complementarity. For example, for a 30-linked nucleoside oligonucleotide agent, the contiguous nucleobase region which is complementary to a region of a MSH3 gene, generally does not contain any mismatch within the central 5-10 linked nucleosides. The methods described herein or methods known in the art can be used to determine whether an oligonucleotide containing a mismatch to a target sequence is effective in inhibiting the expression of a MSH3 gene. Consideration of the efficacy of oligonucleotides with mismatches in inhibiting expression of a MSH3 gene is important, especially if the particular region of complementarity in a MSH3 gene is known to have polymorphic sequence variation within the population.

[0152] Construction of vectors for expression of polynucleotides can be accomplished using conventional techniques which do not require detailed explanation to one of ordinary skill in the art. For generation of efficient expression vectors, it is necessary to have regulatory sequences that control the expression of the polynucleotide. These regulatory sequences include promoter and enhancer sequences and are influenced by specific cellular factors that interact with these sequences, and are well known in the art.

[0153] A. Alternative Oligonucleosides

[0154] In one aspect, one or more of the linked nucleosides or internucleosidic linkages of the oligonucleotide, is naturally occurring, and does not comprise, e.g., chemical modifications and/or conjugations known in the art and described herein. In another aspect, one or more of the linked nucleosides or internucleosidic linkages of an oligonucleotide, is chemically modified to enhance stability or other beneficial characteristics. Without being bound by theory, it is believed that certain modifications can increase nuclease resistance and/or serum stability, or decrease immunogenicity. For example, oligonucleotides can contain nucleotides found to occur naturally in DNA or RNA (e.g., adenine, thymidine, guanosine, cytidine, uridine, or inosine) or can contain alternative nucleosides or internucleosidic linkages which have one or more chemical modifications to one or more components of the nucleotide (e.g., the nucleobase, sugar, or phospho-linker moiety). Oligonucleotides can be linked to one another through naturally occurring phosphodiester bonds, or can contain alternative linkages (e.g., covalently linked through phosphorothioate (e.g., Sp phosphorothioate or Rp phosphorothioate), 3′-methylenephosphonate, 5′-methylenephosphonate, 3′-phosphoamidate, 2′-5′ phosphodiester, guanidinium, S-methylthiourea, 2′-alkoxy, alkyl phosphate, or peptide bonds).

[0155] In some aspects, substantially all of the nucleosides or internucleosidic linkages of an oligonucleotide are alternative nucleosides. In other aspects, all of the nucleosides or internucleosidic linkages of an oligonucleotide are alternative nucleosides. Oligonucleotides in which “substantially all of the nucleosides are alternative nucleosides” are largely but not wholly modified and can include not more than five, four, three, two, or one naturally-occurring nucleosides. In still other aspects, oligonucleotides can include not more than five, four, three, two, or one alternative nucleosides.

[0156] The nucleic acids can be synthesized and/or modified by methods well established in the art, such as those described in “Current protocols in nucleic acid chemistry,” Beaucage, S. L. et al. (Edrs.), John Wiley & Sons, Inc., New York, N.Y., USA, which is hereby incorporated herein by reference. Alternative nucleotides and nucleosides include those with modifications including, for example, end modifications, e.g., 5′-end modifications (phosphorylation, conjugation, inverted linkages) or 3′-end modifications (conjugation, DNA nucleotides, inverted linkages, etc.); base modifications, e.g., replacement with stabilizing bases, destabilizing bases, or bases that base pair with an expanded repertoire of partners, removal of bases (abasic nucleotides), or conjugated bases; sugar modifications (e.g., at the 2′-position or 4′-position) or replacement of the sugar; and/or backbone modifications, including modification or replacement of the phosphodiester linkages. The nucleobase can be an isonucleoside in which the nucleobase is moved from the C1 position of the sugar moiety to a different position (e.g. C2, C3, C4, or C5). Specific examples of oligonucleotide compounds useful in the aspects described herein include, but are not limited to alternative nucleosides containing modified backbones or no natural internucleoside linkages. Nucleotides and nucleosides having modified backbones include, among others, those that do not have a phosphorus atom in the backbone. For the purposes of this specification, and as sometimes referenced in the art, alternative RNAs that do not have a phosphorus atom in their internucleoside backbone can be considered to be oligonucleosides. In some aspects, an oligonucleotide will have a phosphorus atom in its internucleoside backbone.

[0157] Alternative internucleoside linkages include, for example, phosphorothioates, chiral phosphorothioates, phosphorodithioates, phosphotriesters, aminoalkylphosphotriesters, methyl and other alkyl phosphonates including 3′-alkylene phosphonates and chiral phosphonates, phosphinates, phosphoramidates including 3′-amino phosphoramidate and aminoalkylphosphoramidates, thionophosphoramidates, thionoalkylphosphonates, thionoalkylphosphotriesters, and boronophosphates having normal 3′-5′ linkages, 2′-5′-linked analogs of these, and those having inverted polarity wherein the adjacent pairs of nucleoside units are linked 3′-5′ to 5′-3′ or 2′-5′ to 5′-2′. Various salts, mixed salts, and free acid forms are also included.

[0158] Representative U.S. patents that teach the preparation of the above phosphorus-containing linkages include, but are not limited to, U.S. Pat. Nos. 3,687,808; 4,469,863; 4,476,301; 5,023,243; 5,177,195; 5,188,897; 5,264,423; 5,276,019; 5,278,302; 5,286,717; 5,321,131; 5,399,676; 5,405,939; 5,453,496; 5,455,233; 5,466,677; 5,476,925; 5,519,126; 5,536,821; 5,541,316; 5,550,111; 5,563,253; 5,571,799; 5,587,361; 5,625,050; 6,028,188; 6,124,445; 6,160,109; 6,169,170; 6,172,209; 6,239,265; 6,277,603; 6,326,199; 6,346,614; 6,444,423; 6,531,590; 6,534,639; 6,608,035; 6,683,167; 6,858,715; 6,867,294; 6,878,805; 7,015,315; 7,041,816; 7,273,933; 7,321,029; and U.S. Pat. RE39464, the entire contents of each of which are hereby incorporated herein by reference.

[0159] Alternative internucleoside linkages that do not include a phosphorus atom therein have backbones that are formed by short chain alkyl or cycloalkyl internucleoside linkages, mixed heteroatoms and alkyl or cycloalkyl internucleoside linkages, or one or more short chain heteroatomic or heterocyclic internucleoside linkages. These include those having morpholino linkages (formed in part from the sugar portion of a nucleoside); siloxane backbones; sulfide, sulfoxide and sulfone backbones; formacetyl and thioformacetyl backbones; methylene formacetyl and thioformacetyl backbones; alkene containing backbones; sulfamate backbones; methyleneimino and methylenehydrazino backbones; sulfonate and sulfonamide backbones; amide backbones; and others having mixed N, O, S, and CH₂ component parts.

[0160] Representative U.S. patents that teach the preparation of the above oligonucleosides include, but are not limited to, U.S. Pat. Nos. 5,034,506; 5,166,315; 5,185,444; 5,214,134; 5,216,141; 5,235,033; 5,64,562; 5,264,564; 5,405,938; 5,434,257; 5,466,677; 5,470,967; 5,489,677; 5,541,307; 5,561,225; 5,596,086; 5,602,240; 5,608,046; 5,610,289; 5,618,704; 5,623,070; 5,663,312; 5,633,360; 5,677,437; and, 5,677,439, the entire contents of each of which are hereby incorporated herein by reference.

[0161] In other aspects, suitable oligonucleotides include those in which both the sugar and the internucleoside linkage, i.e., the backbone, of the nucleotide units are replaced. The base units are maintained for hybridization with an appropriate nucleic acid target compound. One such oligomeric compound, a mimetic that has been shown to have excellent hybridization properties, is referred to as a peptide nucleic acid (PNA). In PNA compounds, the sugar of a nucleoside is replaced with an amide containing backbone, in particular an aminoethylglycine backbone. The nucleobases are retained and are bound directly or indirectly to aza nitrogen atoms of the amide portion of the backbone. Representative U.S. patents that teach the preparation of PNA compounds include, but are not limited to, U.S. Pat. Nos. 5,539,082; 5,714,331; and 5,719,262, the entire contents of each of which are hereby incorporated herein by reference. Additional PNA compounds suitable for use in the oligonucleotides are described in, for example, in Nielsen et al., Science, 1991, 254, 1497-1500.

[0162] Some aspects include oligonucleotides with phosphorothioate backbones and oligonucleotides with heteroatom backbones, and in particular —CH₂—NH—CH₂—, —CH₂—N(CH₃)—O—CH₂—[known as a methylene (methylimino) or MMI backbone], —CH₂—O—N(CH₃)—CH₂—, —CH₂—N(CH₃)—N(CH₃)—CH₂— and —N(CH₃)—CH₂—CH₂—[wherein the native phosphodiester backbone is represented as —O—P—O—CH₂—] of the above-referenced U.S. Pat. No. 5,489,677, and the amide backbones of the above-referenced U.S. Pat. No. 5,602,240. In some aspects, the oligonucleotides featured herein have morpholino backbone structures of the above-referenced U.S. Pat. No. 5,034,506. In other aspects, the oligonucleotides described herein include phosphorodiamidate morpholino oligomers (PMO), in which the deoxyribose moiety is replaced by a morpholine ring, and the charged phosphodiester inter-subunit linkage is replaced by an uncharged phophorodiamidate linkage, as described in Summerton, et al., Antisense Nucleic Acid Drug Dev. 1997, 7:63-70.

[0163] Alternative nucleosides and nucleotides can contain one or more substituted sugar moieties. The oligonucleotides, e.g., oligonucleotides, featured herein can include one of the following at the 2′-position: OH; F; O-, S-, or N-alkyl; O-, S-, or N-alkenyl; O-, S- or N-alkynyl; or O-alkyl-O-alkyl, wherein the alkyl, alkenyl and alkynyl can be substituted or unsubstituted C₁ to C₁₀ alkyl or C₂ to C₁₀ alkenyl and alkynyl. Exemplary suitable modifications include —O[(CH₂)ₙO]ₘCH₃, —O(CH₂)ₙOCH₃, —O(CH₂)ₙ—NH₂, —O(CH₂)ₙCH₃, —O(CH₂)ₙ—ONH₂, and —O(CH₂)ₙ—ON[(CH₂)ₙCH_{3]2}, where n and m are from 1 to about 10. In other aspects, oligonucleotides include one of the following at the 2′ position: C₁ to C₁₀ lower alkyl, substituted lower alkyl, alkaryl, aralkyl, O-alkaryl or O-aralkyl, SH, SCH₃, OCN, Cl, Br, CN, CF₃, OCF₃, SOCH₃, SO₂CH₃, ONO₂, NO₂, N₃, NH₂, heterocycloalkyl, heterocycloalkaryl, aminoalkylamino, polyalkylamino, substituted silyl, an RNA cleaving group, a reporter group, an intercalator, a group for improving the pharmacokinetic properties of an oligonucleotide, or a group for improving the pharmacodynamic properties of an oligonucleotide, and other substituents having similar properties. In some aspects, the modification includes a 2′-methoxyethoxy (2′-O—CH₂CH₂OCH₃, also known as 2′-O-(2-methoxyethyl) or 2′-MOE) (Martin et al., Helv. Chin. Acta, 1995, 78:486-504) i.e., an alkoxy-alkoxy group. MOE nucleosides confer several beneficial properties to oligonucleotides including, but not limited to, increased nuclease resistance, improved pharmacokinetics properties, reduced non-specific protein binding, reduced toxicity, reduced immunostimulatory properties, and enhanced target affinity as compared to unmodified oligonucleotides.

[0164] Another exemplary alternative contains 2′-dimethylaminooxyethoxy, i.e., a —O(CH₂)₂ON(CH₃)₂ group, also known as 2′-DMAOE, as described in examples herein below, and 2′-dimethylaminoethoxyethwry (also known in the art as 2′-O-dimethylaminoethoxyethyl or 2′-DMAEOE), i.e., 2′-O—(CH₂)₂—O—(CH₂)₂—N(CH₃)₂. Further exemplary alternatives include: 5′-Me-2′-F nucleotides, 5′-Me-2′-OMe nucleotides, 5′-Me-2′-deoxynucleotides, (both R and S isomers in these three families); 2′-alkoxyalkyl; and 2′-NMA (N-methylacetamide).

[0165] Other alternatives include 2′-methoxy (2′-OCH3), 2′-aminopropoxy (2′-OCH₂CH₂CH₂NH₂) and 2′-fluoro (2′-F). Similar modifications can be made at other positions on the nucleosides and nucleotides of an oligonucleotide, particularly the 3′ position of the sugar on the 3′ terminal nucleotide or in 2′-5′ linked oligonucleotides and the 5′ position of 5′ terminal nucleotide. Oligonucleotides can have sugar mimetics such as cyclobutyl moieties in place of the pentofuranosyl sugar. Representative U.S. patents that teach the preparation of such modified sugar structures include, but are not limited to, U.S. Pat. Nos. 4,981,957; 5,118,800; 5,319,080; 5,359,044; 5,393,878; 5,446,137; 5,466,786; 5,514,785; 5,519,134; 5,567,811; 5,576,427; 5,591,722; 5,597,909; 5,610,300; 5,627,053; 5,639,873; 5,646,265; 5,658,873; 5,670,633; and 5,700,920, certain of which are commonly owned with the instant application. The entire contents of each of the foregoing are hereby incorporated herein by reference.

[0166] An oligonucleotide can include nucleobase (often referred to in the art simply as “base”) alternatives (e.g., modifications or substitutions). Unmodified or natural nucleobases include the purine bases adenine (A) and guanine (G), and the pyrimidine bases thymine (T), cytosine (C) and uracil (U). Alternative nucleobases include other synthetic and natural nucleobases such as 5-methylcytidine, 5-hydroxymethylcytidine, 5-formylcytidine, 5-carboxycytidine, pyrrolocytidine, dideoxycytidine, uridine, 5-methoxyuridine, 5-hydroxydeoxyuridine, dihydrouridine, 4-thiourdine, pseudouridine, 1-methyl-pseudouridine, deoxyuridine, 5-hydroxybutynl-2′-deoxyuridine, xanthine, hypoxanthine, 7-deaza-xanthine, thienoguanine, 8-aza-7-deazaguanosine, 7-methylguanosine, 7-deazaguanosine, 6-aminomethyl-7-deazaguanosine, 8-aminoguanine, 2,2,7-trimethylguanosine, 8-methyladenine, 8-azidoadenine, 7-methyladenine, 7-deazaadenine, 3-deazaadenine, 2,6-diaminopurine, 2-aminopurine, 7-deaza-8-aza-adenine, 8-amino-adenine, thymine, dideoxythymine, 5-nitroindole, 2-aminoadenine, 6-methyl and other alkyl derivatives of adenine and guanine, 2-propyl and other alkyl derivatives of adenine and guanine, 2-thiouridine, 2-thiothymine and 2-thiocytosine, 5-halouracil and cytosine, 5-propynyl uridine and cytidine, 6-azo uridine, cytidine and thymine, 4-thiouridine, 8-halo, 8-amino, 8-thiol, 8-thioalkyl, 8-hydroxyl anal other 8-substituted adenines and guanines, 5-halo, particularly 5-bromo, 5-trifluoromethyl and other 5-substituted uridines and cytidines, 8-azaguanine and 8-azaadenine, and 3-deazaguanine. Further nucleobases include those disclosed in U.S. Pat. No. 3,687,808, those disclosed in Modified Nucleosides in Biochemistry, Biotechnology and Medicine, Herdewijn, P. ed. Wiley-VCH, 2008; those disclosed in The Concise Encyclopedia Of Polymer Science And Engineering, pages 858-859, Kroschwitz, J. L, ed. John Wiley & Sons, 1990, these disclosed by Englisch et al., (1991) Angewandte Chemie, International Edition, 30:613, and those disclosed by Sanghvi, Y S., Chapter 15, Antisense Research and Applications, pages 289-302, Crooke, S. T. and Lebleu, B., Ed., CRC Press, 1993. Certain of these nucleobases are particularly useful for increasing the binding affinity of the oligonucleotide. These include 5-substituted pyrimidines, 6-azapyrimidines, and N-2, N-6 and 0-6 substituted purines, including 2-aminopropyladenine, 5-propynyluracil, and 5-propynylcytosine. 5-methylcytosine substitutions have been shown to increase nucleic acid duplex stability by 0.6-1.2° C. (Sanghvi, Y. S., Crooke, S. T. and Lebleu, B., Eds., Antisense Research and Applications, CRC Press, Boca Raton, 1993, pp. 276-278) and are exemplary base substitutions, even more particularly when combined with 2′-O-methoxyethyl sugar modifications.

[0167] Representative U.S. patents that teach the preparation of certain of the above noted alternative nucleobases as well as other alternative nucleobases include, but are not limited to, the above noted U.S. Pat. Nos. 3,687,808, 4,845,205; 5,130,30; 5,134,066; 5,175,273; 5,367,066; 5,432,272; 5,457,187; 5,459,255; 5,484,908; 5,502,177; 5,525,711; 5,552,540; 5,587,469; 5,594,121, 5,596,091; 5,614,617; 5,681,941; 5,750,692; 6,015,886; 6,147,200; 6,166,197; 6,222,025; 6,235,887; 6,380,368; 6,528,640; 6,639,062; 6,617,438; 7,045,610; 7,427,672; and 7,495,088, the entire contents of each of which are hereby incorporated herein by reference.

[0168] In other aspects, the sugar moiety in the nucleotide can be a ribose molecule, optionally having a 2′-O-methyl, 2′-O-MOE, 2′-F, 2′-amino, 2′-O-propyl, 2′-aminopropyl, or 2′-OH modification.

[0169] An oligonucleotide can include one or more bicyclic sugar moieties. A “bicyclic sugar” is a furanosyl ring modified by the bridging of two atoms. A “bicyclic nucleoside” (“BNA”) is a nucleoside having a sugar moiety comprising a bridge connecting two carbon atoms of the sugar ring, thereby forming a bicyclic ring system. In some aspects, the bridge connects the 4′-carbon and the 2′-carbon of the sugar ring. Thus, in some aspects, an oligonucleotide can include one or more locked nucleosides. A locked nucleoside is a nucleoside having a modified ribose moiety in which the ribose moiety comprises an extra bridge connecting the 2′ and 4′ carbons. In other words, a locked nucleoside is a nucleoside comprising a bicyclic sugar moiety comprising a 4′-CH₂—O-2′ bridge. This structure effectively “locks” the ribose in the 3′-endo structural conformation. The addition of locked nucleosides to oligonucleotides has been shown to increase oligonucleotide stability in serum, and to reduce off-target effects (Grunweller, A. et al., (2003) Nucleic Acids Research 31(12):3185-3193). Examples of bicyclic nucleosides for use in the polynucleotides include without limitation nucleosides comprising a bridge between the 4′ and the 2′ ribosyl ring atoms. In some aspects, the polynucleotide agents include one or more bicyclic nucleosides comprising a 4′ to 2′ bridge. Examples of such 4′ to 2′ bridged bicyclic nucleosides, include but are not limited to 4′-(CH₂)—O-2′ (LNA); 4′-(CH₂)—S-2′; 4′-(CH₂)₂—O-2′ (ENA); 4′-CH(CH₃)—O-2′ (also referred to as “constrained ethyl” or “cEt”) and 4′-CH(CH₂OCH3)-O-2′ (and analogs thereof; see, e.g., U.S. Pat. No. 7,399,845); 4′-C(CH₃)(CH₃)—O-2′ (and analogs thereof; see e.g., U.S. Pat. No. 8,278,283); 4′-CH₂—N(OCH₃)-2′ (and analogs thereof; see e.g., U.S. Pat. No. 8,278,425); 4′-CH₂—O—N(CH₃)₂-2′ (see, e.g., U.S. Patent Publication No. 2004/0171570); 4′-CH₂—N(R)—O-2′, wherein R is H, C₁-C₁₂ alkyl, or a protecting group (see, e.g., U.S. Pat. No. 7,427,672); 4′-CH₂—C(H)(CH₃)-2′ (see, e.g., Chattopadhyaya et al., J. Org. Chem., 2009, 74, 118-134); and 4′-CH₂—C(═CH₂)-2′ (and analogs thereof; see, e.g., U.S. Pat. No. 8,278,426). The entire contents of each of the foregoing are hereby incorporated herein by reference.

[0170] Additional representative U.S. patents and US Patent Publications that teach the preparation of locked nucleic acid nucleotides include, but are not limited to, the following: U.S. Pat. Nos. 6,268,490; 6,525,191; 6,670,461; 6,770,748; 6,794,499; 6,998,484; 7,053,207; 7,034,133; 7,084,125; 7,399,845; 7,427,672; 7,569,686; 7,741,457; 8,022,193; 8,030,467; 8,278,425; 8,278,426; 8,278,283; US 2008/0039618; and US 2009/0012281, the entire contents of each of which are hereby incorporated herein by reference.

[0171] Any of the foregoing bicyclic nucleosides can be prepared having one or more stereochemical sugar configurations including for example α-L-ribofuranose and 13-D-ribofuranose (see WO 99/14226).

[0172] An oligonucleotide can be modified to include one or more constrained ethyl nucleosides. As used herein, a “constrained ethyl nucleoside” or “cEt” is a locked nucleoside comprising a bicyclic sugar moiety comprising a 4′-CH(CH₃)—O-2′ bridge. In one aspect, a constrained ethyl nucleoside is in the S conformation referred to herein as “S-cEt.”

[0173] An oligonucleotide can include one or more “conformationally restricted nucleosides” (“CRN”). CRN are nucleoside analogs with a linker connecting the C2′ and C4′ carbons of ribose or the C3 and —C5′ carbons of ribose. CRN lock the ribose ring into a stable conformation and increase the hybridization affinity to mRNA. The linker is of sufficient length to place the oxygen in an optimal position for stability and affinity resulting in less ribose ring puckering.

[0174] Representative publications that teach the preparation of certain of the above noted CRN include, but are not limited to, US Patent Publication No. 2013/0190383; and PCT publication WO 2013/036868, the entire contents of each of which are hereby incorporated herein by reference.

[0175] In some aspects, an oligonucleotide comprises one or more monomers that are UNA (unlocked nucleoside) nucleosides. UNA is unlocked acyclic nucleoside, wherein any of the bonds of the sugar has been removed, forming an unlocked “sugar” residue. In one example, UNA also encompasses monomer with bonds between C1′-C4′ have been removed (i.e. the covalent carbon-oxygen-carbon bond between the C1′ and C4′ carbons). In another example, the C2′-C3′ bond (i.e. the covalent carbon-carbon bond between the C2′ and C3′ carbons) of the sugar has been removed (see Nuc. Acids Symp. Series, 52, 133-134 (2008) and Fluiter et al., Mol. Biosyst., 2009, 10, 1039 hereby incorporated by reference).

[0176] Representative U.S. publications that teach the preparation of UNA include, but are not limited to, U.S. Pat. No. 8,314,227; and US Patent Publication Nos. 2013/0096289; 2013/0011922; and 2011/0313020, the entire contents of each of which are hereby incorporated herein by reference.

[0177] The ribose molecule can be modified with a cyclopropane ring to produce a tricyclodeoxynucleic acid (tricyclo DNA). The ribose moiety can be substituted for another sugar such as 1,5,-anhydrohexitol, threose to produce a threose nucleoside (TNA), or arabinose to produce an arabino nucleoside. The ribose molecule can be replaced with non-sugars such as cyclohexene to produce cyclohexene nucleoside or glycol to produce glycol nucleosides.

[0178] Potentially stabilizing modifications to the ends of nucleoside molecules can include N-(acetylaminocaproyl)-4-hydroxyprolinol (Hyp-C6-NHAc), N-(caproyl-4-hydroxyprolinol (Hyp-C6), N-(acetyl-4-hydroxyprolinol (Hyp-NHAc), thymidine-2′-O-deoxythymidine (ether), N-(aminocaproyl)-4-hydroxyprolinol (Hyp-C6-amino), 2-docosanoyl-uridine-3″-phosphate, inverted base dT(idT) and others. Disclosure of this modification can be found in PCT Publication No. WO 2011/005861.

[0179] Other alternatives chemistries of an oligonucleotide include a 5′ phosphate or 5′ phosphate mimic, e.g., a 5′-terminal phosphate or phosphate mimic of an oligonucleotide. Suitable phosphate mimics are disclosed in, for example US Patent Publication No. 2012/0157511, the entire contents of which are incorporated herein by reference.

[0180] Exemplary oligonucleotides comprise nucleosides with alternative sugar moieties and can comprise DNA or RNA nucleosides. In some aspects, the oligonucleotide comprises nucleosides comprising alternative sugar moieties and DNA nucleosides. Incorporation of alternative nucleosides into the oligonucleotide can enhance the affinity of the oligonucleotide for the target nucleic acid. In that case, the alternative nucleosides can be referred to as affinity enhancing alternative nucleotides.

[0181] In some aspects, the oligonucleotide comprises at least 1 alternative nucleoside, such as at least 2, at least 3, at least 4, at least 5, at least 6, at least 7, at least 8, at least 9, at least 10, at least 11, at least 12, at least 13, at least 14, at least 15 or at least 16 alternative nucleosides. In other aspects, the oligonucleotides comprise from 1 to 10 alternative nucleosides, such as from 2 to 9 alternative nucleosides, such as from 3 to 8 alternative nucleosides, such as from 4 to 7 alternative nucleosides, such as 6 or 7 alternative nucleosides. In an aspect, the oligonucleotide can comprise alternatives, which are independently selected from these three types of alternatives (alternative sugar moiety, alternative nucleobase, and alternative internucleoside linkage), or a combination thereof. In one aspect, the oligonucleotide comprises one or more nucleosides comprising alternative sugar moieties, e.g., 2′ sugar alternative nucleosides. In some aspect, the oligonucleotide comprises the one or more 2′ sugar alternative nucleoside independently selected from the group consisting of 2′-O-alkyl-RNA, 2′-O-methyl-RNA, 2′-alkoxy-RNA, 2′-O-methoxyethyl-RNA, 2′-amino-DNA, 2′-fluoro-DNA, arabino nucleic acid (ANA), 2′-fluoro-ANA, and BNA (e.g., LNA) nucleosides. In some aspects, the one or more alternative nucleoside is a BNA.

[0182] In some aspects, at least 1 of the alternative nucleosides is a BNA (e.g., an LNA), such as at least 2, such as at least 3, at least 4, at least 5, at least 6, at least 7, or at least 8 of the alternative nucleosides are BNAs. In a still further aspect, all the alternative nucleosides are BNAs.

[0183] In a further aspect the oligonucleotide comprises at least one alternative internucleoside linkage. In some aspects, the internucleoside linkages within the contiguous nucleotide sequence are phosphorothioate or boronophosphate internucleoside linkages. In some aspects, all the internucleotide linkages in the contiguous sequence of the oligonucleotide are phosphorothioate linkages. In some aspects, the phosphorothioate linkages are stereochemically pure phosphorothioate linkages. In some aspects, the phosphorothioate linkages are Sp phosphorothioate linkages. In other aspects, the phosphorothioate linkages are Rp phosphorothioate linkages.

[0184] In some aspects, the oligonucleotide comprises at least one alternative nucleoside which is a 2′-MOE-RNA, such as 2, 3, 4, 5, 6, 7, 8, 9, or 10 2′-MOE-RNA nucleoside units. In some aspects, the 2′-MOE-RNA nucleoside units are connected by phosphorothioate linkages. In some aspects, at least one of said alternative nucleoside is 2′-fluoro DNA, such as 2, 3, 4, 5, 6, 7, 8, 9, or 10 2′-fluoro-DNA nucleoside units. In some aspects, the oligonucleotide comprises at least one BNA unit and at least one 2′ substituted modified nucleoside. In some aspects, the oligonucleotide comprises both 2′ sugar modified nucleosides and DNA units. In some aspects, the oligonucleotide or contiguous nucleotide region thereof is a gapmer oligonucleotide.

[0185] B. Oligonucleotides Conjugated to Ligands

[0186] Oligonucleotides can be chemically linked to one or more ligands, moieties, or conjugates that enhance the activity, cellular distribution, or cellular uptake of the oligonucleotide. Such moieties include but are not limited to lipid moieties such as a cholesterol moiety (Letsinger et al., (1989) Proc. Natl. Acid. Sci. USA, 86: 6553-6556), cholic acid (Manoharan et al., (1994) Biorg. Med. Chem. Let., 4:1053-1060), a thioether, e.g., beryl-S-tritylthiol (Manoharan et al., (1992) Ann. N.Y. Acad. Sci., 660:306-309; Manoharan et al., (1993) Biorg. Med. Chem. Let., 3:2765-2770), a thiocholesterol (Oberhauser et al., (1992) Nucl. Acids Res., 20:533-538), an aliphatic chain, e.g., dodecandiol or undecyl residues (Saison-Behmoaras et al., (1991) EMBO J, 10:1111-1118; Kabanov et al., (1990) FEBS Lett., 259:327-330; Svinarchuk et al., (1993) Biochimie, 75:49-54), a phospholipid, e.g., di-hexadecyl-rac-glycerol or triethyl-ammonium 1,2-di-O-hexadecyl-rac-glycero-3-phosphonate (Manoharan et al., (1995) Tetrahedron Lett., 36:3651-3654; Shea et al., (1990) Nucl. Acids Res., 18:3777-3783), a polyamine or a polyethylene glycol chain (Manoharan et al., (1995) Nucleosides & Nucleotides, 14:969-973), or adamantane acetic acid (Manoharan et al., (1995) Tetrahedron Lett., 36:3651-3654), a palmityl moiety (Mishra et al., (1995) Biochim. Biophys. Acta, 1264:229-237), or an octadecylamine or hexylamino-carbonyloxycholesterol moiety (Crooke et al., (1996) J. Pharmacol. Exp. Ther., 277:923-937).

[0187] In one aspect, a ligand alters the distribution, targeting, or lifetime of an oligonucleotide agent into which it is incorporated. In some aspects, a ligand provides an enhanced affinity for a selected target, e.g., molecule, cell or cell type, compartment, e.g., a cellular or organ compartment, tissue, organ, or region of the body, as, e.g., compared to a species absent such a ligand.

[0188] Ligands can include a naturally occurring substance, such as a protein (e.g., human serum albumin (HSA), low-density lipoprotein (LDL), or globulin); carbohydrate (e.g., a dextran, pullulan, chitin, chitosan, inulin, cyclodextrin, N-acetylglucosamine, N-acetylgalactosamine, or hyaluronic acid); or a lipid. The ligand can be a recombinant or synthetic molecule, such as a synthetic polymer, e.g., a synthetic polyamino acid. Examples of polyamino acids include polyamino acid is a polylysine (PLL), poly L-aspartic acid, poly L-glutamic acid, styrene-maleic acid anhydride copolymer, poly(L-lactide-co-glycolied) copolymer, divinyl ether-maleic anhydride copolymer, N-(2-hydroxypropyl)methacrylamide copolymer (HMPA), polyethylene glycol (PEG), polyvinyl alcohol (PVA), polyurethane, poly(2-ethylacryllic acid), N-isopropylacrylamide polymers, or polyphosphazine. Example of polyamines include: polyethylenimine, polylysine (PLL), spermine, spermidine, polyamine, pseudopeptide-polyamine, peptidomimetic polyamine, dendrimer polyamine, arginine, amidine, protamine, cationic lipid, cationic porphyrin, quaternary salt of a polyamine, or an alpha helical peptide.

[0189] Ligands can include targeting groups, e.g., a cell or tissue targeting agent, e.g., a lectin, glycoprotein, lipid or protein, e.g., an antibody, that bind to a specified cell type such as a kidney cell. A targeting group can be a thyrotropin, melanotropin, lectin, glycoprotein, surfactant protein A, Mucin carbohydrate, multivalent lactose, multivalent galactose, N-acetyl-galactosamine, N-acetyl-gulucosamine multivalent mannose, multivalent fucose, glycosylated polyaminoacids, multivalent galactose, transferrin, bisphosphonate, polyglutamate, polyaspartate, a lipid, cholesterol, a steroid, bile acid, folate, vitamin B12, vitamin A, biotin, or an RGD peptide or RGD peptide mimetic.

[0190] Other examples of ligands include dyes, intercalating agents (e.g. acridines), cross-linkers (e.g. psoralen, mitomycin C), porphyrins (TPPC4, texaphyrin, Sapphyrin), polycyclic aromatic hydrocarbons (e.g., phenazine, dihydrophenazine), artificial endonucleases (e.g. EDTA), lipophilic molecules, e.g., cholesterol, cholic acid, adamantane acetic acid, 1-pyrene butyric acid, dihydrotestosterone, 1,3-Bis-O (hexadecyl)glycerol, geranyloxyhexyl group, hexadecylglycerol, borneol, menthol, 1,3-propanediol, heptadecyl group, palmitic acid, myristic acid, O3-(oleoyl)lithocholic acid, O3-(oleoyl)cholenic acid, dimethoxytrityl, or phenoxazine) and peptide conjugates (e.g., antennapedia peptide, Tat peptide), alkylating agents, phosphate, amino, mercapto, PEG (e.g., PEG-40K), MPEG, [MPEG]2, polyamino, alkyl, substituted alkyl, radiolabeled markers, enzymes, haptens (e.g. biotin), transport/absorption facilitators (e.g., aspirin, vitamin E, folic acid), synthetic ribonucleases (e.g., imidazole, bisimidazole, histamine, imidazole clusters, acridine-imidazole conjugates, Eu3+ complexes of tetraazamacrocycles), dinitrophenyl, HRP, or AP.

[0191] Ligands can be proteins, e.g., glycoproteins, or peptides, e.g., molecules having a specific affinity for a co-ligand, or antibodies e.g., an antibody, that binds to a specified cell type such as a hepatic cell. Ligands can include hormones and hormone receptors. They can include non-peptidic species, such as lipids, lectins, carbohydrates, vitamins, cofactors, multivalent lactose, multivalent galactose, N-acetyl-galactosamine, N-acetyl-gulucosamine multivalent mannose, or multivalent fucose.

[0192] The ligand can be a substance, e.g., a drug, which can increase the uptake of the oligonucleotide agent into the cell, for example, by disrupting the cell's cytoskeleton, e.g., by disrupting the cell's microtubules, microfilaments, and/or intermediate filaments. The drug can be, for example, taxon, vincristine, vinblastine, cytochalasin, nocodazole, japlakinolide, latrunculin A, phalloidin, swinholide A, indanocine, or myoservin.

[0193] In some aspects, a ligand attached to an oligonucleotide as described herein acts as a pharmacokinetic modulator (PK modulator). PK modulators include lipophiles, bile acids, steroids, phospholipid analogues, peptides, protein binding agents, PEG, vitamins etc. Exemplary PK modulators include, but are not limited to, cholesterol, fatty acids, cholic acid, lithocholic acid, dialkylglycerides, diacylglyceride, phospholipids, sphingolipids, naproxen, ibuprofen, vitamin E, biotin etc. Oligonucleotides that comprise a number of phosphorothioate linkages are also known to bind to serum protein, thus short oligonucleotides, e.g., oligonucleotides of about 5 bases, 10 bases, 15 bases, or 20 bases, comprising multiple of phosphorothioate linkages in the backbone are also amenable as ligands (e.g. as PK modulating ligands). In addition, aptamers that bind serum components (e.g. serum proteins) are also suitable for use as PK modulating ligands in the aspects described herein.

[0194] Ligand-conjugated oligonucleotides can be synthesized by the use of an oligonucleotide that bears a pendant reactive functionality, such as that derived from the attachment of a linking molecule onto the oligonucleotide (described below). This reactive oligonucleotide can be reacted directly with commercially-available ligands, ligands that are synthesized bearing any of a variety of protecting groups, or ligands that have a linking moiety attached thereto.

[0195] The oligonucleotides used in the conjugates can be conveniently and routinely made through the well-known technique of solid-phase synthesis. Equipment for such synthesis is sold by several vendors including, for example, Applied Biosystems (Foster City, Calif.). Any other means for such synthesis known in the art can additionally or alternatively be employed. It is also known to use similar techniques to prepare other oligonucleotides, such as the phosphorothioates and alkylated derivatives.

[0196] In the ligand-conjugated oligonucleotides, such as the ligand-molecule bearing sequence-specific linked nucleosides, the oligonucleotides and oligonucleosides can be assembled on a suitable DNA synthesizer utilizing standard nucleotide or nucleoside precursors, or nucleotide or nucleoside conjugate precursors that already bear the linking moiety, ligand-nucleotide or nucleoside-conjugate precursors that already bear the ligand molecule, or non-nucleoside ligand-bearing building blocks.

[0197] When using conjugate precursors that already bear a linking moiety, the synthesis of the sequence-specific linked nucleosides is typically completed, and the ligand molecule is then reacted with the linking moiety to form the ligand-conjugated oligonucleotide. In some aspects, the oligonucleotides or linked nucleosides are synthesized by an automated synthesizer using phosphoramidites derived from ligand-nucleoside conjugates in addition to the standard phosphoramidites and non-standard phosphoramidites that are commercially available and routinely used in oligonucleotide synthesis.

[0198] i. Lipid Conjugates

[0199] In one aspect, the ligand or conjugate is a lipid or lipid-based molecule. Such a lipid or lipid-based molecule can bind a serum protein, e.g., human serum albumin (HSA). An HSA binding ligand allows for distribution of the conjugate to a target tissue, e.g., a non-kidney target tissue of the body. A lipid or lipid-based ligand can (a) increase resistance to degradation of the conjugate, (b) increase targeting or transport into a target cell or cell membrane, and/or (c) be used to adjust binding to a serum protein, e.g., HSA.

[0200] In another aspect, the ligand is a moiety, e.g., a vitamin, which is taken up by a target cell, e.g., a proliferating cell. Exemplary vitamins include vitamin A, E, and K.

[0201] ii. Cell Permeation Agents

[0202] In another aspect, the ligand is a cell-permeation agent, such as a helical cell-permeation agent. In one aspect, the agent is amphipathic. An exemplary agent is a peptide such as tat or antennopedia. If the agent is a peptide, it can be modified, including a peptidylmimetic, invertomers, non-peptide or pseudo-peptide linkages, and use of D-amino acids. In one aspect, the helical agent is an alpha-helical agent, which can have a lipophilic and a lipophobic phase.

[0203] The ligand can be a peptide or peptidomimetic. A peptidomimetic (also referred to herein as an oligopeptidomimetic) is a molecule capable of folding into a defined three-dimensional structure similar to a natural peptide. The attachment of peptide and peptidomimetics to oligonucleotide agents can affect pharmacokinetic distribution of the oligonucleotide, such as by enhancing cellular recognition and absorption. The peptide or peptidomimetic moiety can be about 5-50 amino acids long, e.g., about 5, 10, 15, 20, 25, 30, 35, 40, 45, or 50 amino acids long.

[0204] A peptide or peptidomimetic can be, for example, a cell permeation peptide, cationic peptide, amphipathic peptide, or hydrophobic peptide (e.g., consisting primarily of Tyr, Trp, or Phe). The peptide moiety can be a dendrimer peptide, constrained peptide or crosslinked peptide. In another alternative, the peptide moiety can include a hydrophobic membrane translocation sequence (MTS). An exemplary hydrophobic MTS-containing peptide is RFGF having the amino acid sequence AAVALLPAVLLALLAP. An RFGF analogue (e.g., amino acid sequence AALLPVLLAAP containing a hydrophobic MTS can be a targeting moiety. The peptide moiety can be a “delivery” peptide, which can carry large polar molecules including peptides, oligonucleotides, and protein across cell membranes. For example, sequences from the HIV Tat protein (GRKKRRQRRRPPQ and the Drosophila Antennapedia protein (RQIKIWFQNRRMKWKK have been found to be capable of functioning as delivery peptides. A peptide or peptidomimetic can be encoded by a random sequence of DNA, such as a peptide identified from a phage-display library, or one-bead-one-compound (OBOC) combinatorial library (Lam et al., Nature, 354:82-84, 1991). Examples of a peptide or peptidomimetic tethered to an oligonucleotide agent via an incorporated monomer unit for cell targeting purposes is an arginine-glycine-aspartic acid (RGD)-peptide, or RGD mimic. A peptide moiety can range in length from about 5 amino acids to about 40 amino acids. The peptide moieties can have a structural modification, such as to increase stability or direct conformational properties. Any of the structural modifications described below can be utilized.

[0205] An RGD peptide for use in the compositions and methods can be linear or cyclic, and can be modified, e.g., glycosylated or methylated, to facilitate targeting to a specific tissue(s). RGD-containing peptides and peptidiomimemtics can include D-amino acids, as well as synthetic RGD mimics. In addition to RGD, one can use other moieties that target the integrin ligand. Some conjugates of this ligand target PECAM-1 or VEGF.

[0206] A cell permeation peptide is capable of permeating a cell, e.g., a microbial cell, such as a bacterial or fungal cell, or a mammalian cell, such as a human cell. A microbial cell-permeating peptide can be, for example, an α-helical linear peptide (e.g., LL-37 or Ceropin P1), a disulfide bond-containing peptide (e.g., α-defensin, β-defensin, or bactenecin), or a peptide containing only one or two dominating amino acids (e.g., PR-39 or indolicidin). A cell permeation peptide can include a nuclear localization signal (NLS). For example, a cell permeation peptide can be a bipartite amphipathic peptide, such as MPG, which is derived from the fusion peptide domain of HIV-1 gp41 and the NLS of SV40 large T antigen (Simeoni et al., Nucl. Acids Res. 31:2717-2724, 2003).

[0207] iii. Carbohydrate Conjugates

[0208] In some aspects of the compositions and methods described herein, an oligonucleotide further comprises a carbohydrate. The carbohydrate conjugated oligonucleotides are advantageous for the in vivo delivery of nucleic acids, as well as compositions suitable for in vivo therapeutic use, as described herein. As used herein, “carbohydrate” refers to a compound which is either a carbohydrate per se made up of one or more monosaccharide units having at least 6 carbon atoms (which can be linear, branched or cyclic) with an oxygen, nitrogen or sulfur atom bonded to each carbon atom; or a compound having as a part thereof a carbohydrate moiety made up of one or more monosaccharide units each having at least six carbon atoms (which can be linear, branched or cyclic), with an oxygen, nitrogen or sulfur atom bonded to each carbon atom. Representative carbohydrates include the sugars (mono-, di-, tri- and oligosaccharides containing from about 4, 5, 6, 7, 8, or 9 monosaccharide units), and polysaccharides such as starches, glycogen, cellulose and polysaccharide gums. Specific monosaccharides include C5 and above (e.g., C5, C6, C7, or C8) sugars; di- and trisaccharides include sugars having two or three monosaccharide units (e.g., C5, C6, C7, or C8).

[0209] In one aspect, a carbohydrate conjugate for use in the compositions and methods described herein is a monosaccharide.

[0210] In some aspects, the carbohydrate conjugate further comprises one or more additional ligands as described above, such as, but not limited to, a PK modulator and/or a cell permeation peptide.

[0211] Additional carbohydrate conjugates (and linkers) suitable for use include those described in PCT Publication Nos. WO 2014/179620 and WO 2014/179627, the entire contents of each of which are incorporated herein by reference.

[0212] iv. Linkers

[0213] In some aspects, the conjugate or ligand described herein can be attached to an oligonucleotide with various linkers that can be cleavable or non-cleavable.

[0214] Linkers typically comprise a direct bond or an atom such as oxygen or sulfur, a unit such as NR^{B}, C(O), C(O)NH, SO, SO₂, SO₂NH or a chain of atoms, such as, but not limited to, substituted or unsubstituted alkyl, substituted or unsubstituted alkenyl, substituted or unsubstituted alkynyl, arylalkyl, arylalkenyl, arylalkynyl, heteroarylalkyl, heteroarylalkenyl, heteroarylalkynyl, heterocyclylalkyl, heterocyclylalkenyl, heterocyclylalkynyl, aryl, heteroaryl, heterocyclyl, cycloalkyl, cycloalkenyl, alkylarylalkyl, alkylarylalkenyl, alkylarylalkynyl, alkenylarylalkyl, alkenylarylalkenyl, alkenylarylalkynyl, alkynylarylalkyl, alkynylarylalkenyl, alkynylarylalkynyl, alkylheteroarylalkyl, alkylheteroarylalkenyl, alkylheteroarylalkynyl, alkenylheteroarylalkyl, alkenylheteroarylalkenyl, alkenylheteroarylalkynyl, alkynylheteroarylalkyl, alkynylheteroarylalkenyl, alkynylheteroarylalkynyl, alkylheterocyclylalkyl, alkylheterocyclylalkenyl, alkylhererocyclylalkynyl, alkenylheterocyclylalkyl, alkenylheterocyclylalkenyl, alkenylheterocyclylalkynyl, alkynylheterocyclylalkyl, alkynylheterocyclylalkenyl, alkynylheterocyclylalkynyl, alkylaryl, alkenylaryl, alkynylaryl, alkylheteroaryl, alkenylheteroaryl, alkynylhereroaryl, which one or more methylenes can be interrupted or terminated by O, S, S(O), SO₂, N(R⁸), C(O), substituted or unsubstituted aryl, substituted or unsubstituted heteroaryl, substituted or unsubstituted heterocyclic; where R⁸ is hydrogen, acyl, aliphatic or substituted aliphatic. In one aspect, the linker is between about 1-24, 2-24, 3-24, 4-24, 5-24, 6-24, 6-18, 7-18, 8-18, 7-17, 8-17, 6-16, 7-17, 8-16 or 1, 2, 3, 4, 5, 6, 7, 8, 9, 10, 11, 12, 13, 14, 15, 16, 17, 18, 19, 20, 21, 21, 22, 23, or 24 atoms.

[0215] A cleavable linking group is one which is sufficiently stable outside the cell, but which upon entry into a target cell is cleaved to release the two parts the linker is holding together. In somes aspects, the cleavable linking group is cleaved at least about 10 times, 20 times, 30 times, 40 times, 50 times, 60 times, 70 times, 80 times, 90 times, or more, or at least about 100 times faster in a target cell or under a first reference condition (which can, e.g., be selected to mimic or represent intracellular conditions) than in the blood of a subject, or under a second reference condition (which can, e.g., be selected to mimic or represent conditions found in the blood or serum).

[0216] Cleavable linking groups are susceptible to cleavage agents, e.g., pH, redox potential, or the presence of degradative molecules. Generally, cleavage agents are more prevalent or found at higher levels or activities inside cells than in serum or blood. Examples of such degradative agents include: redox agents which are selective for particular substrates or which have no substrate specificity, including, e.g., oxidative or reductive enzymes or reductive agents such as mercaptans, present in cells, that can degrade a redox cleavable linking group by reduction; esterases; endosomes or agents that can create an acidic environment, e.g., those that result in a pH of five or lower; enzymes that can hydrolyze or degrade an acid cleavable linking group by acting as a general acid, peptidases (which can be substrate specific), and phosphatases.

[0217] A cleavable linkage group, such as a disulfide bond can be susceptible to pH. The pH of human serum is 7.4, while the average intracellular pH is slightly lower, ranging from about 7.1-7.3. Endosomes have a more acidic pH, in the range of 5.5-6.0, and lysosomes have an even more acidic pH at around 5.0. Some linkers will have a cleavable linking group that is cleaved at a preferred pH, thereby releasing a cationic lipid from the ligand inside the cell, or into the desired compartment of the cell.

[0218] A linker can include a cleavable linking group that is cleavable by a particular enzyme. The type of cleavable linking group incorporated into a linker can depend on the cell to be targeted. For example, a liver-targeting ligand can be linked to a cationic lipid through a linker that includes an ester group. Liver cells are rich in esterases, and therefore the linker will be cleaved more efficiently in liver cells than in cell types that are not esterase-rich. Other cell-types rich in esterases include cells of the lung, renal cortex, and testis.

[0219] Linkers that contain peptide bonds can be used when targeting cell types rich in peptidases, such as liver cells and synoviocytes.

[0220] In general, the suitability of a candidate cleavable linking group can be evaluated by testing the ability of a degradative agent (or condition) to cleave the candidate linking group. It will also be desirable to test the candidate cleavable linking group for the ability to resist cleavage in the blood or when in contact with other non-target tissue. Thus, one can determine the relative susceptibility to cleavage between at least two conditions, where at least one condition is selected to be indicative of cleavage in a target cell and another condition is selected to be indicative of cleavage in other tissues or biological fluids, e.g., blood or serum. The evaluations can be carried out in cell free systems, in cells, in cell culture, in organ or tissue culture, or in whole animals. It can be useful to make initial evaluations in cell-free or culture conditions and to confirm by further evaluations in whole animals. In some aspects, useful candidate compounds are cleaved at least about 2, 4, 10, 20, 30, 40, 50, 60, 70, 80, 90, or 100 times faster in the cell (or under in vitro conditions selected to mimic intracellular conditions) as compared to blood or serum (or under in vitro conditions selected to mimic extracellular conditions).

[0221] a. Redox Cleavable Linking Groups

[0222] In one aspect, a cleavable linking group is a redox cleavable linking group that is cleaved upon reduction or oxidation. An example of reductively cleavable linking group is a disulphide linking group (—S—S—). To determine if a candidate cleavable linking group is a suitable “reductively cleavable linking group,” or for example is suitable for use with a particular oligonucleotide moiety and particular targeting agent one can look to methods described herein. For example, a candidate can be evaluated by incubation with dithiothreitol (DTT), or other reducing agent using reagents know in the art, which mimic the rate of cleavage which would be observed in a cell, e.g., a target cell. The candidates can be evaluated under conditions which are selected to mimic blood or serum conditions. In one aspect, candidate compounds are cleaved by at most about 10% in the blood. In other aspects, useful candidate compounds are degraded at least about 2, 4, 10, 20, 30, 40, 50, 60, 70, 80, 90, or 100 times faster in the cell (or under in vitro conditions selected to mimic intracellular conditions) as compared to blood (or under in vitro conditions selected to mimic extracellular conditions). The rate of cleavage of candidate compounds can be determined using standard enzyme kinetics assays under conditions chosen to mimic intracellular media and compared to conditions chosen to mimic extracellular media.

[0223] b. Phosphate-Based Cleavable Linking Groups

[0224] In another aspect, a cleavable linker comprises a phosphate-based cleavable linking group. A phosphate-based cleavable linking group is cleaved by agents that degrade or hydrolyze the phosphate group. An example of an agent that cleaves phosphate groups in cells are enzymes such as phosphatases in cells. Examples of phosphate-based linking groups are —O—P(O)(OR^{k})—O—, —O—P(S)(OR^{k})—O—, —O—P(S)(SR^{k})—O—, —S—P(O)(OR^{k})—O—, —O—P(O)(OR^{k})—S—, —S—P(O)(OR^{k})—S—, —O—P(S)(OR^{k})—S—, —S—P(S)(OR^{k})—O—, —O—P(O)(R^{k})—O—, —O—P(S)(R^{k})—O—, —S—P(O)(R^{k})—O—, —S—P(S)(R^{k})—O—, —S—P(O)(R^{k})—S—, —O—P(S)(R^{k})—S—. These candidates can be evaluated using methods analogous to those described above.

[0225] c. Acid Cleavable Linking Groups

[0226] In another aspect, a cleavable linker comprises an acid cleavable linking group. An acid cleavable linking group is a linking group that is cleaved under acidic conditions. In some aspects, acid cleavable linking groups are cleaved in an acidic environment with a pH of about 6.5 or lower (e.g., about 6.0, 5.75, 5.5, 5.25, 5.0, or lower), or by agents such as enzymes that can act as a general acid. In a cell, specific low pH organelles, such as endosomes and lysosomes can provide a cleaving environment for acid cleavable linking groups. Examples of acid cleavable linking groups include but are not limited to hydrazones, esters, and esters of amino acids. Acid cleavable groups can have the general formula —C═NN—, C(O)O, or —OC(O). In one aspect, the carbon is attached to the oxygen of the ester (the alkoxy group) is an aryl group, substituted alkyl group, or tertiary alkyl group such as dimethyl pentyl or t-butyl. These candidates can be evaluated using methods analogous to those described above.

[0227] d. Ester-Based Linking Groups

[0228] In another aspect, a cleavable linker comprises an ester-based cleavable linking group. An ester-based cleavable linking group is cleaved by enzymes such as esterases and amidases in cells. Examples of ester-based cleavable linking groups include but are not limited to esters of alkylene, alkenylene and alkynylene groups. Ester cleavable linking groups have the general formula —C(O)O—, or —OC(O)—. These candidates can be evaluated using methods analogous to those described above.

[0229] e. Peptide-Based Cleaving Groups

[0230] In yet another aspect, a cleavable linker comprises a peptide-based cleavable linking group. A peptide-based cleavable linking group is cleaved by enzymes such as peptidases and proteases in cells. Peptide-based cleavable linking groups are peptide bonds formed between amino acids to yield oligopeptides (e.g., dipeptides, tripeptides etc.) and polypeptides. Peptide-based cleavable groups do not include the amide group (—C(O)NH—). The amide group can be formed between any alkylene, alkenylene, or alkynelene. A peptide bond is a special type of amide bond formed between amino acids to yield peptides and proteins. The peptide based cleavage group is generally limited to the peptide bond (i.e., the amide bond) formed between amino acids yielding peptides and proteins and does not include the entire amide functional group. Peptide-based cleavable linking groups have the general formula —NHCHR^{A}C(O)NHCHR^{B}C(O)—, where RA and RB are the R groups of the two adjacent amino acids. These candidates can be evaluated using methods analogous to those described above.

[0231] In one aspect, an oligonucleotide is conjugated to a carbohydrate through a linker. Linkers include bivalent and trivalent branched linker groups. Linkers for oligonucleotide carbohydrate conjugates include, but are not limited to, those described in formulas 24-35 of PCT Publication No. WO 2018/195165.

[0232] Representative U.S. patents that teach the preparation of oligonucleotide conjugates include, but are not limited to, U.S. Pat. Nos. 4,828,979; 4,948,882; 5,218,105; 5,525,465; 5,541,313; 5,545,730; 5,552,538; 5,578,717, 5,580,731; 5,591,584; 5,109,124; 5,118,802; 5,138,045; 5,414,077; 5,486,603; 5,512,439; 5,578,718; 5,608,046; 4,587,044; 4,605,735; 4,667,025; 4,762,779; 4,789,737; 4,824,941; 4,835,263; 4,876,335; 4,904,582; 4,958,013; 5,082,830; 5,112,963; 5,214,136; 5,082,830; 5,112,963; 5,214,136; 5,245,022; 5,254,469; 5,258,506; 5,262,536; 5,272,250; 5,292,873; 5,317,098; 5,371,241, 5,391,723; 5,416,203, 5,451,463; 5,510,475; 5,512,667; 5,514,785; 5,565,552; 5,567,810; 5,574,142; 5,585,481; 5,587,371; 5,595,726; 5,597,696; 5,599,923; 5,599,928 and 5,688,941; 6,294,664; 6,320,017; 6,576,752; 6,783,931; 6,900,297; 7,037,646; 8,106,022, the entire contents of each of which are hereby incorporated herein by reference.

[0233] It is not necessary for all positions in a given compound to be uniformly modified, and in fact more than one of the aforementioned modifications can be incorporated in a single compound or even at a single nucleoside within an oligonucleotide. Oligonucleotide compounds that are chimeric compounds are also contemplated. Chimeric oligonucleotides typically contain at least one region wherein the RNA is modified so as to confer upon the oligonucleotide increased resistance to nuclease degradation, increased cellular uptake, and/or increased binding affinity for the target nucleic acid. An additional region of the oligonucleotide can serve as a substrate for enzymes capable of cleaving RNA:DNA. By way of example, RNase H is a cellular endonuclease which cleaves the RNA strand of an RNA:DNA duplex. Activation of RNase H, therefore, results in cleavage of the RNA target, thereby greatly enhancing the efficiency of oligonucleotide inhibition of gene expression. Consequently, comparable results can often be obtained with shorter oligonucleotides when chimeric oligonucleotides are used, compared to phosphorothioate deoxy oligonucleotides hybridizing to the same target region. Cleavage of the RNA target can be routinely detected by gel electrophoresis and, if necessary, associated nucleic acid hybridization techniques known in the art.

[0234] In certain instances, the nucleotides of an oligonucleotide can be modified by a non-ligand group. A number of non-ligand molecules have been conjugated to oligonucleotides in order to enhance the activity, cellular distribution, or cellular uptake of the oligonucleotide, and procedures for performing such conjugations are available in the scientific literature. Such non-ligand moieties have included lipid moieties, such as cholesterol (Kubo, T. et al., Biochem. Biophys. Res. Comm, 2007, 365(1):54-61; Letsinger et al., Proc. Natl. Acad. Sci. USA, 1989, 86:6553), cholic acid (Manoharan et al., Bioorg. Med. Chem. Lett., 1994, 4:1053), a thioether, e.g., hexyl-S-tritylthiol (Manoharan et al., Ann. N.Y. Acad. Sci., 1992, 660:306; Manoharan et al., Bioorg. Med. Chem. Let., 1993, 3:2765), a thiocholesterol (Oberhauser et al., Nucl. Acids Res., 1992, 20:533), an aliphatic chain, e.g., dodecandiol or undecyl residues (Saison-Behmoaras et al., EMBO J., 1991, 10:111; Kabanov et al., FEBS Lett., 1990, 259:327; Svinarchuk et al., Biochimie, 1993, 75:49), a phospholipid, e.g., di-hexadecyl-rac-glycerol or triethylammonium 1,2-di-O-hexadecyl-rac-glycero-3-H-phosphonate (Manoharan et al., Tetrahedron Lett., 1995, 36:3651; Shea et al., Nucl. Acids Res., 1990, 18:3777), a polyamine or a polyethylene glycol chain (Manoharan et al., Nucleosides & Nucleotides, 1995, 14:969), or adamantane acetic acid (Manoharan et al., Tetrahedron Lett., 1995, 36:3651), a palmityl moiety (Mishra et al., Biochim. Biophys. Acta, 1995, 1264:229), or an octadecylamine or hexylamino-carbonyl-oxycholesterol moiety (Crooke et al., J. Pharmacol. Exp. Ther., 1996, 277:923). Representative United States patents that teach the preparation of such oligonucleotide conjugates have been listed above. Typical conjugation protocols involve the synthesis of an oligonucleotide bearing an aminolinker at one or more positions of the sequence. The amino group is then reacted with the molecule being conjugated using appropriate coupling or activating reagents. The conjugation reaction can be performed either with the oligonucleotide still bound to the solid support or following cleavage of the oligonucleotide, in solution phase. Purification of the oligonucleotide conjugate by HPLC typically affords the pure conjugate.

[0235] IV. Pharmaceutical Uses

[0236] The oligonucleotide compositions described herein are useful in the methods described herein, and, while not bound by theory, are believed to exert their desirable effects through their ability to modulate the level, status, and/or activity of a MutS8 heterodimer comprising MSH3, e.g., by inhibiting the activity or level of the MSH3 protein in a cell in a mammal.

[0237] An aspect relates to methods of treating disorders related to DNA mismatch repair such as trinucleotide repeat expansion disorders in a subject in need thereof. Another aspect includes reducing the level of MSH3 in a cell of a subject identified as having a trinucleotide repeat expansion disorder. Still another aspect includes a method of inhibiting expression of MSH3 in a cell in a subject. Further aspects include methods of decreasing trinucleotide repeat expansion in a cell. The methods include contacting a cell with an oligonucleotide, in an amount effective to inhibit expression of MSH3 in the cell, thereby inhibiting expression of MSH3 in the cell.

[0238] Based on the above methods, an oligonucleotide, or a composition comprising such an oligonucleotide, for use in therapy, or for use as a medicament, or for use in treating disorders related to DNA mismatch repair such as repeat expansion disorders in a subject in need thereof, or for use in reducing the level of MSH3 in a cell of a subject identified as having a trinucleotide repeat expansion disorder, or for use in inhibiting expression of MSH3 in a cell in a subject, or for use in decreasing trinucleotide repeat expansion in a cell is contemplated. The uses include the contacting of a cell with the oligonucleotide, in an amount effective to inhibit expression of MSH3 in the cell, thereby inhibiting expression of MSH3 in the cell. Aspects described below in relation to the methods described herein are also applicable to these further aspects.

[0239] Contacting of a cell with an oligonucleotide can be done in vitro or in vivo. Contacting a cell in vivo with the oligonucleotide includes contacting a cell or group of cells within a subject, e.g., a human subject, with the oligonucleotide. Combinations of in vitro and in vivo methods of contacting a cell are also possible. Contacting a cell can be direct or indirect, as discussed above. Furthermore, contacting a cell can be accomplished via a targeting ligand, including any ligand described herein or known in the art. In some aspects, the targeting ligand is a carbohydrate moiety, e.g., a GaINAc3 ligand, or any other ligand that directs the oligonucleotide to a site of interest. Cells can include those of the central nervous system, or muscle cells.

[0240] Inhibiting expression of a MSH3 gene includes any level of inhibition of a MSH3 gene, e.g., at least partial suppression of the expression of a MSH3 gene, such as an inhibition by at least about 20%. In some aspects, inhibition is by at least about 25%, at least about 30%, at least about 35%, at least about 40%, at least about 45%, at least about 50%, at least about 55%, at least about 60%, at least about 65%, at least about 70%, at least about 75%, at least about 80%, at least about 85%, at least about 90%, at least about 91%, at least about 92%, at least about 93%, at least about 94%, at least about 95%, at least about 96%, at least about 97%, at least about 98%, or at least about 99%.

[0241] The expression of a MSH3 gene can be assessed based on the level of any variable associated with MSH3 gene expression, e.g., MSH3 mRNA level or MSH3 protein level.

[0242] Inhibition can be assessed by a decrease in an absolute or relative level of one or more of these variables compared with a control level. The control level can be any type of control level that is utilized in the art, e.g., a pre-dose baseline level, or a level determined from a similar subject, cell, or sample that is untreated or treated with a control (such as, e.g., buffer only control or inactive agent control).

[0243] In some aspects, surrogate markers can be used to detect inhibition of MSH3. For example, effective treatment of a trinucleotide repeat expansion disorder, as demonstrated by acceptable diagnostic and monitoring criteria with an agent to reduce MSH3 expression can be understood to demonstrate a clinically relevant reduction in MSH3.

[0244] In some aspects of the methods, expression of a MSH3 gene is inhibited by at least 20%, 25%, 30%, 35%, 40%, 45%, 50%, 55%, 60%, 65%, 70%, 75%, 80%, 85%, 90%, or 95%, or to below the level of detection of the assay. In some aspects, the methods include a clinically relevant inhibition of expression of MSH3, e.g., as demonstrated by a clinically relevant outcome after treatment of a subject with an agent to reduce the expression of MSH3.

[0245] Inhibition of the expression of a MSH3 gene can be manifested by a reduction of the amount of mRNA expressed by a first cell or group of cells (such cells can be present, for example, in a sample derived from a subject) in which a MSH3 gene is transcribed and which has or have been treated (e.g., by contacting the cell or cells with an oligonucleotide, or by administering an oligonucleotide to a subject in which the cells are or were present) such that the expression of a MSH3 gene is inhibited, as compared to a second cell or group of cells substantially identical to the first cell or group of cells but which has not or have not been so treated (control cell(s) not treated with an oligonucleotide or not treated with an oligonucleotide targeted to the gene of interest). The degree of inhibition can be expressed in terms of:

$$\frac{( mRNA in control cells ) - ( mRNA in treated cells )}{( mRNA in control cells )} \times 100 \%$$

[0246] In other aspects, inhibition of the expression of a MSH3 gene can be assessed in terms of a reduction of a parameter that is functionally linked to MSH3 gene expression, e.g., MSH3 protein expression or MSH3 signaling pathways. MSH3 gene silencing can be determined in any cell expressing MSH3, either endogenous or heterologous from an expression construct, and by any assay known in the art.

[0247] Inhibition of the expression of a MSH3 protein can be manifested by a reduction in the level of the MSH3 protein that is expressed by a cell or group of cells (e.g., the level of protein expressed in a sample derived from a subject). As explained above, for the assessment of mRNA suppression, the inhibition of protein expression levels in a treated cell or group of cells can similarly be expressed as a percentage of the level of protein in a control cell or group of cells.

[0248] A control cell or group of cells that can be used to assess the inhibition of the expression of a MSH3 gene includes a cell or group of cells that has not yet been contacted with an oligonucleotide. For example, the control cell or group of cells can be derived from an individual subject (e.g., a human or animal subject) prior to treatment of the subject with an oligonucleotide.

[0249] The level of MSH3 mRNA that is expressed by a cell or group of cells can be determined using any method known in the art for assessing mRNA expression. In one aspect, the level of expression of MSH3 in a sample is determined by detecting a transcribed polynucleotide, or portion thereof, e.g., mRNA of the MSH3 gene. RNA can be extracted from cells using RNA extraction techniques including, for example, using acid phenol/guanidine isothiocyanate extraction (RNAzol B; Biogenesis), RNEASY™ RNA preparation kits (Qiagen) or PAXgene (PreAnalytix, Switzerland). Typical assay formats utilizing ribonucleic acid hybridization include nuclear run-on assays, RT-PCR, RNase protection assays, northern blotting, in situ hybridization, and microarray analysis. Circulating MSH3 mRNA can be detected using methods the described in PCT Publication WO2012/177906, the entire contents of which are hereby incorporated herein by reference. In some aspects, the level of expression of MSH3 is determined using a nucleic acid probe. The term “probe,” as used herein, refers to any molecule that is capable of selectively binding to a specific MSH3 sequence, e.g. to an mRNA or polypeptide. Probes can be synthesized by one of skill in the art, or derived from appropriate biological preparations. Probes can be specifically designed to be labeled. Examples of molecules that can be utilized as probes include, but are not limited to, RNA, DNA, proteins, antibodies, and organic molecules.

[0250] Isolated mRNA can be used in hybridization or amplification assays that include, but are not limited to, Southern or northern analyses, polymerase chain reaction (PCR) analyses, and probe arrays. One method for the determination of mRNA levels involves contacting the isolated mRNA with a nucleic acid molecule (probe) that can hybridize to MSH3 mRNA. In one aspect, the mRNA is immobilized on a solid surface and contacted with a probe, for example by running the isolated mRNA on an agarose gel and transferring the mRNA from the gel to a membrane, such as nitrocellulose. In an alternative aspect, the probe(s) are immobilized on a solid surface and the mRNA is contacted with the probe(s), for example, in an AFFYMETRIX gene chip array. A skilled artisan can readily adapt known mRNA detection methods for use in determining the level of MSH3 mRNA.

[0251] An alternative method for determining the level of expression of MSH3 in a sample involves the process of nucleic acid amplification and/or reverse transcriptase (to prepare cDNA) of for example mRNA in the sample, e.g., by RT-PCR (the experimental aspect set forth in Mullis, 1987, U.S. Pat. No. 4,683,202), ligase chain reaction (Barany (1991) Proc. Natl. Acad. Sci. USA 88:189-193), self-sustained sequence replication (Guatelli et al. (1990) Proc. Natl. Acad. Sci. USA 87:1874-1878), transcriptional amplification system (Kwoh et al. (1989) Proc. Natl. Acad. Sci. USA 86:1173-1177), Q-Beta Replicase (Lizardi et al. (1988) Bio/Technology 6:1197), rolling circle replication (Lizardi et al., U.S. Pat. No. 5,854,033) or any other nucleic acid amplification method, followed by the detection of the amplified molecules using techniques well known to those of skill in the art. These detection schemes are especially useful for the detection of nucleic acid molecules if such molecules are present in very low numbers. In some aspects, the level of expression of MSH3 is determined by quantitative fluorogenic RT-PCR (i.e., the TAQMAN™ System) or the DUAL-GLO® Luciferase assay. The expression levels of MSH3 mRNA can be monitored using a membrane blot (such as used in hybridization analysis such as northern, Southern, dot, and the like), or microwells, sample tubes, gels, beads or fibers (or any solid support comprising bound nucleic acids). See U.S. Pat. Nos. 5,770,722; 5,874,219; 5,744,305; 5,677,195; and 5,445,934, which are incorporated herein by reference. The determination of MSH3 expression level can comprise using nucleic acid probes in solution.

[0252] In some aspects, the level of mRNA expression is assessed using branched DNA (bDNA) assays or real time PCR (qPCR). The use of this PCR method is described and exemplified in the Examples presented herein. Such methods can be used for the detection of MSH3 nucleic acids.

[0253] The level of MSH3 protein expression can be determined using any method known in the art for the measurement of protein levels. Such methods include, for example, electrophoresis, capillary electrophoresis, high performance liquid chromatography (HPLC), thin layer chromatography (TLC), hyperdiffusion chromatography, fluid or gel precipitin reactions, absorption spectroscopy, a colorimetric assays, spectrophotometric assays, flow cytometry, immunodiffusion (single or double), immunoelectrophoresis, western blotting, radioimmunoassay (RIA), enzyme-linked immunosorbent assays (ELISAs), immunofluorescent assays, electrochemiluminescence assays, and the like. Such assays can be used for the detection of proteins indicative of the presence or replication of MSH3 proteins.

[0254] In some aspects of the methods described herein, the oligonucleotide is administered to a subject such that the oligonucleotide is delivered to a specific site within the subject. The inhibition of expression of MSH3 can be assessed using measurements of the level or change in the level of MSH3 mRNA or MSH3 protein in a sample derived from a specific site within the subject. In some aspects, the methods include a clinically relevant inhibition of expression of MSH3, e.g., as demonstrated by a clinically relevant outcome after treatment of a subject with an agent to reduce the expression of MSH3.

[0255] In other aspects, the oligonucleotide is administered in an amount and for a time effective to result in one of (or more, e.g., two or more, three or more, four or more of): (a) decrease the number of repeats, (b) decrease the level of polyglutamine, (c) decreased cell death (e.g., CNS cell death and/or muscle cell death), (d) delayed onset of the disorder, (e) increased survival of subject, and (f) increased progression free survival of a subject.

[0256] Treating trinucleotide repeat expansion disorders can result in an increase in average survival time of an individual or a population of subjects treated with an oligonucleotide described herein in comparison to a population of untreated subjects. For example, the survival time of an individual or average survival time of a population is increased by more than 30 days (more than 60 days, 90 days, or 120 days). An increase in survival time of an individual or in average survival time of a population can be measured by any reproducible means. An increase in survival time of an individual can be measured, for example, by calculating for an individual the length of survival time following the initiation of treatment with the compound described herein. An increase in average survival time of a population can be measured, for example, by calculating for the average length of survival time following initiation of treatment with the compound described herein. An increase in survival time of an individual can be measured, for example, by calculating for an individual length of survival time following completion of a first round of treatment with a compound or pharmaceutically acceptable salt of a compound described herein. An increase in average survival time of a population can be measured, for example, by calculating for a population the average length of survival time following completion of a first round of treatment with a compound or pharmaceutically acceptable salt of a compound described herein.

[0257] Treating trinucleotide repeat expansion disorders can result in a decrease in the mortality rate of a population of treated subjects in comparison to an untreated population. For example, the mortality rate is decreased by more than 2% (e.g., more than 5%, 10%, or 25%). A decrease in the mortality rate of a population of treated subjects can be measured by any reproducible means, for example, by calculating for a population the average number of disease-related deaths per unit time following initiation of treatment with a compound or pharmaceutically acceptable salt of a compound described herein. A decrease in the mortality rate of a population can be measured, for example, by calculating for a population the average number of disease-related deaths per unit time following completion of a first round of treatment with a compound or pharmaceutically acceptable salt of a compound described herein.

[0258] A. Delivery of Anti-MSH3 Agents

[0259] The delivery of an oligonucleotide to a cell e.g., a cell within a subject, such as a human subject e.g., a subject in need thereof, such as a subject having a trinucleotide repeat expansion disorder can be achieved in a number of different ways. For example, delivery can be performed by contacting a cell with an oligonucleotide either in vitro or in vivo. In vivo delivery can be performed directly by administering a composition comprising an oligonucleotide to a subject. These alternatives are discussed further below.

[0260] In general, any method of delivering a nucleic acid molecule (in vitro or in vivo) can be adapted for use with an oligonucleotide (see e.g., Akhtar S. and Julian R L., (1992) Trends Cell. Biol. 2(5):139-144 and WO94/02595, which are incorporated herein by reference in their entireties). For in vivo delivery, factors to consider in order to deliver an oligonucleotide molecule include, for example, biological stability of the delivered molecule, prevention of non-specific effects, and accumulation of the delivered molecule in the target tissue. The non-specific effects of an oligonucleotide can be minimized by local administration, for example, by direct injection or implantation into a tissue or topically administering the preparation. Local administration to a treatment site maximizes local concentration of the agent, limits the exposure of the agent to systemic tissues that can otherwise be harmed by the agent or that can degrade the agent, and permits a lower total dose of the oligonucleotide to be administered.

[0261] For administering an oligonucleotide systemically for the treatment of a disease, the oligonucleotide can include alternative nucleobases, alternative sugar moieties, and/or alternative internucleoside linkages, or alternatively delivered using a drug delivery system; both methods act to prevent the rapid degradation of the oligonucleotide by endo- and exo-nucleases in vivo. Modification of the oligonucleotide or the pharmaceutical carrier can permit targeting of the oligonucleotide composition to the target tissue and avoid undesirable off-target effects. Oligonucleotide molecules can be modified by chemical conjugation to lipophilic groups such as cholesterol to enhance cellular uptake and prevent degradation. In an alternative aspect, the oligonucleotide can be delivered using drug delivery systems such as a nanoparticle, a lipid nanoparticle, a polyplex nanoparticle, a lipoplex nanoparticle, a dendrimer, a polymer, liposomes, or a cationic delivery system. Positively charged cationic delivery systems facilitate binding of an oligonucleotide molecule (negatively charged) and also enhance interactions at the negatively charged cell membrane to permit efficient uptake of an oligonucleotide by the cell. Cationic lipids, dendrimers, or polymers can either be bound to an oligonucleotide, or induced to form a vesicle or micelle that encases an oligonucleotide. The formation of vesicles or micelles further prevents degradation of the oligonucleotide when administered systemically. In general, any methods of delivery of nucleic acids known in the art may be adaptable to the delivery of the oligonucleotides described herein. Methods for making and administering cationic oligonucleotide complexes are well within the abilities of one skilled in the art (see e.g., Sorensen, D R., et al. (2003) J. Mol. Biol 327:761-766; Verma, U N. et al., (2003) Clin. Cancer Res. 9:1291-1300; Arnold, A S et al., (2007) J. Hypertens. 25:197-205, which are incorporated herein by reference in their entirety). Some non-limiting examples of drug delivery systems useful for systemic delivery of oligonucleotides include DOTAP (Sorensen, D R., et al (2003), supra; Verma, U N. et al., (2003), supra), Oligofectamine, “solid nucleic acid lipid particles” (Zimmermann, T S. et al., (2006) Nature 441:111-114), cardiolipin (Chien, P Y. et al., (2005) Cancer Gene Ther. 12:321-328; Pal, A. et al., (2005) Int J. Oncol. 26:1087-1091), polyethyleneimine (Bonnet M E. et al., (2008) Pharm. Res. August 16 Epub ahead of print; Aigner, A. (2006) J. Biomed. Biotechnol. 71659), Arg-Gly-Asp (RGD) peptides (Liu, S. (2006) Mol. Pharm. 3:472-487), and polyamidoamines (Tomalia, D A. et al., (2007) Biochem. Soc. Trans. 35:61-67; Yoo, H. et al., (1999) Pharm. Res. 16:1799-1804). In some aspects, an oligonucleotide forms a complex with cyclodextrin for systemic administration. Methods for administration and pharmaceutical compositions of oligonucleotides and cyclodextrins can be found in U.S. Pat. No. 7,427,605, which is herein incorporated by reference in its entirety. In some aspects the oligonucleotides described herein are delivered by polyplex or lipoplex nanoparticles. Methods for administration and pharmaceutical compositions of oligonucleotides and polyplex nanoparticles and lipoplex nanoparticles can be found in U.S. Patent Application Nos. 2017/0121454; 2016/0369269; 2016/0279256; 2016/0251478; 2016/0230189; 2015/0335764; 2015/0307554; 2015/0174549; 2014/0342003; 2014/0135376; and 2013/0317086, which are herein incorporated by reference in their entirety.

[0262] i. Membranous Molecular Assembly Delivery Methods

[0263] The oligonucleotides can be delivered using a variety of membranous molecular assembly delivery methods including polymeric, biodegradable microparticle, or microcapsule delivery devices known in the art. For example, a colloidal dispersion system can be used for targeted delivery of an oligonucleotide agent described herein. Colloidal dispersion systems include macromolecule complexes, nanocapsules, microspheres, beads, and lipid-based systems including oil-in-water emulsions, micelles, mixed micelles, and liposomes. Liposomes are artificial membrane vesicles that are useful as delivery vehicles in vitro and in vivo. It has been shown that large unilamellar vesicles (LUV), which range in size from 0.2-4.0 pm can encapsulate a substantial percentage of an aqueous buffer containing large macromolecules. Liposomes are useful for the transfer and delivery of active ingredients to the site of action. Because the liposomal membrane is structurally similar to biological membranes, when liposomes are applied to a tissue, the liposomal bilayer fuses with bilayer of the cellular membranes. As the merging of the liposome and cell progresses, the internal aqueous contents that include the oligonucleotide are delivered into the cell where the oligonucleotide can specifically bind to a target RNA and can mediate RNase H-mediated gene silencing. In some cases, the liposomes are also specifically targeted, e.g., to direct the oligonucleotide to particular cell types. The composition of the liposome is usually a combination of phospholipids, usually in combination with steroids, especially cholesterol. Other phospholipids or other lipids can be used. The physical characteristics of liposomes depend on pH, ionic strength, and the presence of divalent cations.

[0264] A liposome containing an oligonucleotide can be prepared by a variety of methods. In one example, the lipid component of a liposome is dissolved in a detergent so that micelles are formed with the lipid component. For example, the lipid component can be an amphipathic cationic lipid or lipid conjugate. The detergent can have a high critical micelle concentration and can be nonionic. Exemplary detergents include cholate, CHAPS, octylglucoside, deoxycholate, and lauroyl sarcosine. The oligonucleotide preparation is then added to the micelles that include the lipid component. The cationic groups on the lipid interact with the oligonucleotide and condense around the oligonucleotide to form a liposome. After condensation, the detergent is removed, e.g., by dialysis, to yield a liposomal preparation of oligonucleotide.

[0265] If necessary, a carrier compound that assists in condensation can be added during the condensation reaction, e.g., by controlled addition. For example, the carrier compound can be a polymer other than a nucleic acid (e.g., spermine or spermidine). The pH can be adjusted to favor condensation.

[0266] Methods for producing stable polynucleotide delivery vehicles, which incorporate a polynucleotide/cationic lipid complex as a structural component of the delivery vehicle, are further described in, e.g., WO 96/37194, the entire contents of which are incorporated herein by reference. Liposome formation can include one or more aspects of exemplary methods described in Feigner, P. L. et al., (1987) Proc. Natl. Acad. Sci. USA 8:7413-7417; U.S. Pat. Nos. 4,897,355; 5,171,678; Bangham et al., (1965) M. Mol. Biol. 23:238; Olson et al., (1979) Biochim. Biophys. Acta 557:9; Szoka et al., (1978) Proc. Natl. Acad. Sci. 75: 4194; Mayhew et al., (1984) Biochim. Biophys. Acta 775:169; Kim et al., (1983) Biochim. Biophys. Acta 728:339; and Fukunaga et al., (1984) Endocrinol. 115:757. Commonly used techniques for preparing lipid aggregates of appropriate size for use as delivery vehicles include sonication and freeze-thaw plus extrusion (see, e.g., Mayer et al., (1986) Biochim. Biophys. Acta 858:161. Microfluidization can be used when consistently small (50 to 200 nm) and relatively uniform aggregates are desired (Mayhew et al., (1984) Biochim. Biophys. Acta 775:169). These methods are readily adapted to packaging oligonucleotide preparations into liposomes.

[0267] Liposomes fall into two broad classes. Cationic liposomes are positively charged liposomes which interact with the negatively charged nucleic acid molecules to form a stable complex. The positively charged nucleic acid/liposome complex binds to the negatively charged cell surface and is internalized in an endosome. Due to the acidic pH within the endosome, the liposomes are ruptured, releasing their contents into the cell cytoplasm (Wang et al. (1987) Biochem. Biophys. Res. Commun., 147:980-985).

[0268] Liposomes, which are pH-sensitive or negatively charged, entrap nucleic acids rather than complex with them. Since both the nucleic acid and the lipid are similarly charged, repulsion rather than complex formation occurs. Nevertheless, some nucleic acid is entrapped within the aqueous interior of these liposomes. pH sensitive liposomes have been used to deliver nucleic acids encoding the thymidine kinase gene to cell monolayers in culture. Expression of the exogenous gene was detected in the target cells (Zhou et al. (1992) Journal of Controlled Release, 19:269-274).

[0269] One major type of liposomal composition includes phospholipids other than naturally-derived phosphatidylcholine. Neutral liposome compositions, for example, can be formed from dimyristoyl phosphatidylcholine (DMPC) or dipalmitoyl phosphatidylcholine (DPPC). Anionic liposome compositions generally are formed from dimyristoyl phosphatidylglycerol, while anionic fusogenic liposomes are formed primarily from dioleoyl phosphatidylethanolamine (DOPE). Another type of liposomal composition is formed from phosphatidylcholine (PC) such as, for example, soybean PC, and egg PC. Another type is formed from mixtures of phospholipid and/or phosphatidylcholine and/or cholesterol.

[0270] Examples of other methods to introduce liposomes into cells in vitro and in vivo include U.S. Pat. Nos. 5,283,185; 5,171,678; WO 94/00569; WO 93/24640; WO 91/16024; Feigner, (1994) J. Biol. Chem. 269:2550; Nabel, (1993) Proc. Natl. Acad. Sci. 90:11307; Nabel, (1992) Human Gene Ther. 3:649; Gershon, (1993) Biochem. 32:7143; and Strauss, (1992) EMBO J. 11:417.

[0271] Non-ionic liposomal systems have also been examined to determine their utility in the delivery of drugs to the skin, in particular systems comprising non-ionic surfactant and cholesterol. Non-ionic liposomal formulations comprising NOVASOME™ I (glyceryl dilaurate/cholesterol/polyoxyethylene-10-stearyl ether) and NOVASOME™ II (glyceryl distearate/cholesterol/polyoxyethylene-10-stearyl ether) were used to deliver cyclosporin-A into the dermis of mouse skin. Results indicated that such non-ionic liposomal systems were effective in facilitating the deposition of cyclosporine A into different layers of the skin (Hu et al., (1994) S.T.P. Pharma. Sci., 4(6):466).

[0272] Liposomes can be sterically stabilized liposomes, comprising one or more specialized lipids that result in enhanced circulation lifetimes relative to liposomes lacking such specialized lipids. Examples of sterically stabilized liposomes are those in which part of the vesicle-forming lipid portion of the liposome (A) comprises one or more glycolipids, such as monosialoganglioside G_{M1}, or (B) is derivatized with one or more hydrophilic polymers, such as a polyethylene glycol (PEG) moiety. While not wishing to be bound by any particular theory, it is thought in the art that, at least for sterically stabilized liposomes containing gangliosides, sphingomyelin, or PEG-derivatized lipids, the enhanced circulation half-life of these sterically stabilized liposomes derives from a reduced uptake into cells of the reticuloendothelial system (RES) (Allen et al., (1987) FEBS Letters, 223:42; Wu et al., (1993) Cancer Research, 53:3765).

[0273] Various liposomes comprising one or more glycolipids are known in the art. Papahadjopoulos et al. (Ann. N.Y. Acad. Sci., (1987), 507:64) reported the ability of monosialoganglioside G^{M1}, galactocerebroside sulfate, and phosphatidylinositol to improve blood half-lives of liposomes. These findings were expounded upon by Gabizon et al. (Proc. Natl. Acad. Sci. U.S.A., (1988), 85:6949). U.S. Pat. No. 4,837,028 and WO 88/04924, both to Allen et al., disclose liposomes comprising (1) sphingomyelin and (2) the ganglioside GM1 or a galactocerebroside sulfate ester. U.S. Pat. No. 5,543,152 (Webb et al.) discloses liposomes comprising sphingomyelin. Liposomes comprising 1,2-sn-dimyristoylphosphatidylcholine are disclosed in WO 97/13499 (Lim et al).

[0274] In one aspect, cationic liposomes are used. Cationic liposomes possess the advantage of being able to fuse to the cell membrane. Non-cationic liposomes, although not able to fuse as efficiently with the plasma membrane, are taken up by macrophages in vivo and can be used to deliver oligonucleotides to macrophages.

[0275] Further advantages of liposomes include: liposomes obtained from natural phospholipids are biocompatible and biodegradable; liposomes can incorporate a wide range of water and lipid soluble drugs; liposomes can protect encapsulated oligonucleotides in their internal compartments from metabolism and degradation (Rosoff, in “Pharmaceutical Dosage Forms,” Lieberman, Rieger and Banker (Eds.), 1988, volume 1, p. 245). Important considerations in the preparation of liposome formulations are the lipid surface charge, vesicle size and the aqueous volume of the liposomes.

[0276] A positively charged synthetic cationic lipid, N-[1-(2,3-dioleyloxy)propyl]-N,N,N-trimethylammonium chloride (DOTMA) can be used to form small liposomes that interact spontaneously with nucleic acid to form lipid-nucleic acid complexes which are capable of fusing with the negatively charged lipids of the cell membranes of tissue culture cells, resulting in delivery of oligonucleotide (see, e.g., Feigner, P. L. et al., (1987) Proc. Natl. Acad. Sci. USA 8:7413-7417, and U.S. Pat. No. 4,897,355 for a description of DOTMA and its use with DNA).

[0277] A DOTMA analogue, 1,2-bis(oleoyloxy)-3-(trimethylammonia)propane (DOTAP) can be used in combination with a phospholipid to form DNA-complexing vesicles. LIPOFECTIN™ Bethesda Research Laboratories, Gaithersburg, Md.) is an effective agent for the delivery of highly anionic nucleic acids into living tissue culture cells that comprise positively charged DOTMA liposomes which interact spontaneously with negatively charged polynucleotides to form complexes. When enough positively charged liposomes are used, the net charge on the resulting complexes is also positive. Positively charged complexes prepared in this way spontaneously attach to negatively charged cell surfaces, fuse with the plasma membrane, and efficiently deliver functional nucleic acids into, for example, tissue culture cells. Another commercially available cationic lipid, 1,2-bis(oleoyloxy)-3,3-(trimethylammonia)propane (“DOTAP”) (Boehringer Mannheim, Indianapolis, Ind.) differs from DOTMA in that the oleoyl moieties are linked by ester, rather than ether linkages.

[0278] Other reported cationic lipid compounds include those that have been conjugated to a variety of moieties including, for example, carboxyspermine which has been conjugated to one of two types of lipids and includes compounds such as 5-carboxyspermylglycine dioctaoleoylamide (“DOGS”) (TRANSFECTAM™, Promega, Madison, Wis.) and dipalmitoylphosphatidylethanolamine 5-carboxyspermyl-amide (“DPPES”) (see, e.g., U.S. Pat. No. 5,171,678).

[0279] Another cationic lipid conjugate includes derivatization of the lipid with cholesterol (“DC-Chol”) which has been formulated into liposomes in combination with DOPE (See, Gao, X. and Huang, L., (1991) Biochim. Biophys. Res. Commun. 179:280). Lipopolylysine, made by conjugating polylysine to DOPE, has been reported to be effective for transfection in the presence of serum (Zhou, X. et al., (1991) Biochim. Biophys. Acta 1065:8). For certain cell lines, these liposomes containing conjugated cationic lipids, are said to exhibit lower toxicity and provide more efficient transfection than the DOTMA-containing compositions. Other commercially available cationic lipid products include DMRIE and DMRIE-HP (Vical, La Jolla, Calif.) and Lipofectamine (DOSPA) (Life Technology, Inc., Gaithersburg, Md.). Other cationic lipids suitable for the delivery of oligonucleotides are described in WO 98/39359 and WO 96/37194.

[0280] Liposomal formulations are particularly suited for topical administration, liposomes present several advantages over other formulations. Such advantages include reduced side effects related to high systemic absorption of the administered drug, increased accumulation of the administered drug at the desired target, and the ability to administer oligonucleotide into the skin. In some implementations, liposomes are used for delivering oligonucleotide to epidermal cells and also to enhance the penetration of oligonucleotide into dermal tissues, e.g., into skin. For example, the liposomes can be applied topically. Topical delivery of drugs formulated as liposomes to the skin has been documented (see, e.g., Weiner et al., (1992) Journal of Drug Targeting, vol. 2, 405-410 and du Plessis et al., (1992) Antiviral Research, 18:259-265; Mannino, R. J. and Fould-Fogerite, S., (1998) Biotechniques 6:682-690; Itani, T. et al., (1987) Gene 56:267-276; Nicolau, C. et al. (1987) Meth. Enzymol. 149:157-176; Straubinger, R. M. and Papahadjopoulos, D. (1983) Meth. Enzymol. 101:512-527; Wang, C. Y. and Huang, L., (1987) Proc. Natl. Acad. Sci. USA 84:7851-7855).

[0281] Non-ionic liposomal systems have also been examined to determine their utility in the delivery of drugs to the skin, in particular systems comprising non-ionic surfactant and cholesterol. Non-ionic liposomal formulations comprising NOVASOME I (glyceryl dilaurate/cholesterol/polyoxyethylene-10-stearyl ether) and NOVASOME II (glyceryl distearate/cholesterol/polyoxyethylene-10-stearyl ether) were used to deliver a drug into the dermis of mouse skin. Such formulations with oligonucleotides are useful for treating a dermatological disorder.

[0282] The targeting of liposomes is also possible based on, for example, organ-specificity, cell-specificity, and organelle-specificity and is known in the art. In the case of a liposomal targeted delivery system, lipid groups can be incorporated into the lipid bilayer of the liposome to maintain the targeting ligand in stable association with the liposomal bilayer. Various linking groups can be used for joining the lipid chains to the targeting ligand. Additional methods are known in the art and are described, for example in U.S. Patent Application Publication No. 20060058255, the linking groups of which are herein incorporated by reference.

[0283] Liposomes that include oligonucleotides can be made highly deformable. Such deformability can enable the liposomes to penetrate through pore that are smaller than the average radius of the liposome. For example, transfersomes are yet another type of liposomes, and are highly deformable lipid aggregates which are attractive candidates for drug delivery vehicles. Transfersomes can be described as lipid droplets which are so highly deformable that they are easily able to penetrate through pores which are smaller than the droplet. Transfersomes can be made by adding surface edge activators, usually surfactants, to a standard liposomal composition. Transfersomes that include oligonucleotides can be delivered, for example, subcutaneously by infection to deliver oligonucleotides to keratinocytes in the skin. To cross intact mammalian skin, lipid vesicles must pass through a series of fine pores, each with a diameter less than 50 nm, under the influence of a suitable transdermal gradient. In addition, due to the lipid properties, these transfersomes can be self-optimizing (adaptive to the shape of pores, e.g., in the skin), self-repairing, and can frequently reach their targets without fragmenting, and often self-loading. Transfersomes have been used to deliver serum albumin to the skin. The transfersome-mediated delivery of serum albumin has been shown to be as effective as subcutaneous injection of a solution containing serum albumin.

[0284] Other suitable formulations are described in U.S. provisional application Ser. No. 61/018,616, filed Jan. 2, 2008; 61/018,611, filed Jan. 2, 2008; 61/039,748, filed Mar. 26, 2008; 61/047,087, filed Apr. 22, 2008 and 61/051,528, filed May 8, 2008. PCT application No. PCT/US2007/080331, filed Oct. 3, 2007 also describes suitable. Surfactants find wide application in formulations such as emulsions (including microemulsions) and liposomes. The most common way of classifying and ranking the properties of the many different types of surfactants, both natural and synthetic, is by the use of the hydrophile/lipophile balance (HLB). The nature of the hydrophilic group (also known as the “head”) provides the most useful means for categorizing the different surfactants used in formulations (Rieger, in Pharmaceutical Dosage Forms, Marcel Dekker, Inc., New York, N.Y., 1988, p. 285).

[0285] If the surfactant molecule is not ionized, it is classified as a nonionic surfactant. Nonionic surfactants find wide application in pharmaceutical and cosmetic products and are usable over a wide range of pH values. In general, their HLB values range from 2 to about 18 depending on their structure. Nonionic surfactants include nonionic esters such as ethylene glycol esters, propylene glycol esters, glyceryl esters, polyglyceryl esters, sorbitan esters, sucrose esters, and ethoxylated esters. Nonionic alkanolamides and ethers such as fatty alcohol ethoxylates, propoxylated alcohols, and ethoxylated/propoxylated block polymers are also included in this class. The polyoxyethylene surfactants are the most popular members of the nonionic surfactant class.

[0286] If the surfactant molecule carries a negative charge when it is dissolved or dispersed in water, the surfactant is classified as anionic. Anionic surfactants include carboxylates such as soaps, acyl lactylates, acyl amides of amino acids, esters of sulfuric acid such as alkyl sulfates and ethoxylated alkyl sulfates, sulfonates such as alkyl benzene sulfonates, acyl isethionates, acyl taurates and sulfosuccinates, and phosphates. The most important members of the anionic surfactant class are the alkyl sulfates and the soaps.

[0287] If the surfactant molecule carries a positive charge when it is dissolved or dispersed in water, the surfactant is classified as cationic. Cationic surfactants include quaternary ammonium salts and ethoxylated amines. The quaternary ammonium salts are the most used members of this class.

[0288] If the surfactant molecule has the ability to carry either a positive or negative charge, the surfactant is classified as amphoteric. Amphoteric surfactants include acrylic acid derivatives, substituted alkylamides, N-alkylbetaines, and phosphatides.

[0289] The use of surfactants in drug products, formulations and in emulsions has been reviewed (Rieger, in Pharmaceutical Dosage Forms, Marcel Dekker, Inc., New York, N.Y., 1988, p. 285).

[0290] The oligonucleotides for use in the methods can be provided as micellar formulations. Micelles are a particular type of molecular assembly in which amphipathic molecules are arranged in a spherical structure such that all the hydrophobic portions of the molecules are directed inward, leaving the hydrophilic portions in contact with the surrounding aqueous phase. The converse arrangement exists if the environment is hydrophobic.

[0291] ii. Lipid Nanoparticle-Based Delivery Methods

[0292] Oligonucleotides can be fully encapsulated in a lipid formulation, e.g., a lipid nanoparticle (LNP), or other nucleic acid-lipid particle. LNPs are extremely useful for systemic applications, as they exhibit extended circulation lifetimes following intravenous (i.v.) injection and accumulate at distal sites (e.g., sites physically separated from the administration site). LNPs include “pSPLP,” which include an encapsulated condensing agent-nucleic acid complex as set forth in PCT Publication No. WO 00/03683. The particles typically have a mean diameter of about 50 nm to about 150 nm, more typically about 60 nm to about 130 nm, more typically about 70 nm to about 110 nm, most typically about 70 nm to about 90 nm, and are substantially nontoxic. In addition, the nucleic acids when present in the nucleic acid-lipid particles are resistant in aqueous solution to degradation with a nuclease. Nucleic acid-lipid particles and their method of preparation are disclosed in, e.g., U.S. Pat. Nos. 5,976,567; 5,981,501; 6,534,484; 6,586,410; 6,815,432; U.S. Publication No. 2010/0324120 and PCT Publication No. WO 96/40964.

[0293] In one aspect, the lipid to drug ratio (mass/mass ratio) (e.g., lipid to oligonucleotide ratio) will be in the range of from about 1:1 to about 50:1, from about 1:1 to about 25:1, from about 3:1 to about 15:1, from about 4:1 to about 10:1, from about 5:1 to about 9:1, or about 6:1 to about 9:1. Ranges intermediate to the above recited ranges are also contemplated.

[0294] Non-limiting examples of cationic lipids include N,N-dioleyl-N,N-dimethylammonium chloride (DODAC), N,N-distearyl-N,N-dimethylammonium bromide (DDAB), N—(I-(2,3-dioleoyloxy)propyl)-N,N,N-trimethylammonium chloride (DOTAP), N—(I-(2,3-dioleyloxy)propyl)-N,N,N-trimethylammonium chloride (DOTMA), N,N-dimethyl-2,3-dioleyloxy)propylamine (DODMA), 1,2-DiLinoleyloxy-N,N-dimethylaminopropane (DLinDMA), 1,2-Dilinolenyloxy-N,N-dimethylaminopropane (DLenDMA), 1,2-Dilinoleylcarbamoyloxy-3-dimethylaminopropane (DLin-C-DAP), (dimethylamino)acetoxypropane (DLin-DAC), 1,2-Dilinoleyoxy-3-morpholinopropane (DLin-MA), 1,2-Dilinoleoyl-3-dimethylaminopropane (DLinDAP), 1,2-Dilinoleylthio-3-dimethylaminopropane (DLin-S-DMA), 1-Linoleoyl-2-linoleyloxy-3-d imethylaminopropane (DLin-2-DMAP), 1,2-Dilinoleyloxy-3-trimethylaminopropane chloride salt (DLin-TMA.Cl), 1,2-Dilinoleoyl-3-trimethylaminopropane chloride salt (DLin-TAP.Cl), 1,2-Dilinoleyloxy-3-(N-methylpiperazino)propane (DLin-MPZ), or 3-(N,N-Dilinoleylamino)-1,2-propanediol (DLinAP), 3-(N,N-Dioleylamino)-1,2-propanedio (DOAP), 1,2-Dilinoleyloxo-3-(2-N,N-dimethylamino)ethoxypropane (DLin-EG-DMA), 1,2-Dilinolenyloxy-N,N-dimethylaminopropane (DLinDMA), 2,2-Dilinoleyl-4-dimethylaminomethyl-[1,3]-dioxolane (DLin-K-DMA) or analogs thereof, (3aR,5s,6aS)-N,N-dimethyl-2,2-di((9Z,12Z)-octadeca-9,12-dienyetetrahydro-3aH-cyclopenta[d][1,3]dioxol-5-amine (ALN100), (6Z,9Z,28Z,31Z)-heptatriaconta-6,9,28,31-tetraen-19-yl4-(dimethylamino)butanoate (MC3), 1,1′-(2-(4-(2-(2-(bis(2-hydroxydodecyl)amino)ethyl)(2-hydroxydodecyl)amino)ethyl)piperazin-1-yeethylazanediyedidodecan-2-01 (Tech G1), or a mixture thereof. The cationic lipid can comprise, for example, from about 20 mol to about 50 mol % or about 40 mol % of the total lipid present in the particle.

[0295] The ionizable/non-cationic lipid can be an anionic lipid or a neutral lipid including, but not limited to, distearoylphosphatidylcholine (DSPC), dioleoylphosphatidylcholine (DOPC), dipalmitoylphosphatidylcholine (DPPC), dioleoylphosphatidylglycerol (DOPG), dipalmitoylphosphatidylglycerol (DPPG), dioleoyl-phosphatidylethanolamine (DOPE), palmitoyloleoylphosphatidylcholine (POPC), palmitoyloleoylphosphatidylethanolamine (POPE), dioleoyl-phosphatidylethanolamine 4-(N-maleimidomethyl)-cyclohexane-1-carboxylate (DOPE-mal), dipalmitoyl phosphatidyl ethanolamine (DPPE), dimyristoylphosphoethanolamine (DMPE), distearoyl-phosphatidyl-ethanolamine (DSPE), 16-O-monomethyl PE, 16-O-dimethyl PE, 18-1-trans PE, 1-stearoyl-2-oleoyl-phosphatidyethanolamine (SOPE), cholesterol, or a mixture thereof. The non-cationic lipid can be, for example, from about 5 mol % to about 90 mol %, about 10 mol %, or about 60 mol % if cholesterol is included, of the total lipid present in the particle.

[0296] The conjugated lipid that inhibits aggregation of particles can be, for example, a polyethyleneglycol (PEG)-lipid including, without limitation, a PEG-diacylglycerol (DAG), a PEG-dialkyloxypropyl (DAA), a PEG-phospholipid, a PEG-ceramide (Cer), or a mixture thereof. The PEG-DAA conjugate can be, for example, a PEG-dilauryloxypropyl (C12), a PEG-dimyristyloxypropyl (C14), a PEG-dipalmityloxypropyl (Cm), or a PEG-distearyloxypropyl (Cm). The conjugated lipid that prevents aggregation of particles can be, for example, from 0 mol % to about 20 mol % or about 2 mol % of the total lipid present in the particle.

[0297] In some aspects, the nucleic acid-lipid particle further includes cholesterol at, e.g., about 10 mol % to about 60 mol % or about 50 mol % of the total lipid present in the particle.

[0298] B. Combination Therapies

[0299] An oligonucleotide can be used alone or in combination with at least one additional therapeutic agent, e.g., other agents that treat trinucleotide repeat expansion disorders or symptoms associated therewith, or in combination with other types of therapies to treat trinucleotide repeat expansion disorders. In combination treatments, the dosages of one or more of the therapeutic compounds can be reduced from standard dosages when administered alone. For example, doses can be determined empirically from drug combinations and permutations or can be deduced by isobolographic analysis (e.g., Black et al., Neurology 65:S3-S6 (2005)). In this case, dosages of the compounds when combined should provide a therapeutic effect.

[0300] In some aspects, the oligonucleotide agents described herein can be used in combination with at least one additional therapeutic agent to treat a trinucleotide repeat expansion disorder associated with gene having a trinucleotide repeat (e.g., any of the trinucleotide repeat expansion disorders and associated genes having a nucleotide repeat listed in Table 1). In some aspects, at least one of the additional therapeutic agents can be an oligonucleotide (e.g., an ASO) that hybridizes with the mRNA of gene associated with a trinucleotide repeat expansion disorder (e.g., any of the genes listed in Table 1). In some aspects, the trinucleotide repeat expansion disorder is Huntington's disease (HD). In some aspects, the gene associated with a trinucleotide repeat expansion disorder is Huntingtin (HTT). Several allelic variants of the Huntingtin gene have been implicated in the etiology of Huntington's disease. In some cases, these variants are identified on the basis of having unique HD-associated single nucleotide polymorphisms (SNPs). In some aspects, the oligonucleotide hybridizes to an mRNA of the Huntingtin gene containing any of the HD-associated SNPs known in the art (e.g., any of the HD-associated SNPs described in Skotte et al., PLoS One 2014, 9(9): e107434, Carroll et al., Mol. Ther. 2011, 19(12): 2178-85, Warby et al., Am. J. Hum. Gen. 2009, 84(3): 351-66 (herein incorporated by reference)). In some aspects, the oligonucleotide that is an additional therapeutic agent hybridizes to an mRNA of the Huntingtin gene lacking any of the HD-associated SNPs. In some of the aspects, the oligonucleotide that is an additional therapeutic agent hybridizes to an mRNA of the Huntingtin gene having any of the SNPs selected from the group of rs362307 and rs365331. In some aspects, the oligonucleotide that is an additional therapeutic agent can be a modified oligonucleotide (e.g., an oligonucleotide including any of the modifications described herein). In some aspects, the modified oligonucleotides that is an additional therapeutic agent comprise one or more phosphorothioate internucleoside linkages. In some aspects, the modified oligonucleotide comprises one or more 2′-MOE moieties. In some aspects, the oligonucleotide that is an additional therapeutic agent that hybridizes to the mRNA of the Huntingtin gene has a sequence selected from the SEQ ID NOs. 6-285 of U.S. Pat. No. 9,006,198; SEQ ID NOs. 6-8 of US Patent Application Publication No. 2017/0044539; SEQ ID NOs. 1-1565 of US Patent Application Publication 2018/0216108; and SEQ ID NOs. 1-2432 of PCT Publication WO 2017/192679, the sequences of which are hereby incorporated by reference.

[0301] In some aspects, at least one of the additional therapeutic agents is a chemotherapeutic agent (e.g., a cytotoxic agent or other chemical compound useful in the treatment of a trinucleotide repeat expansion disorder).

[0302] In some aspects, at least one of the additional therapeutic agents can be a therapeutic agent which is a non-drug treatment. For example, at least one of the additional therapeutic agents is physical therapy.

[0303] In any of the combination aspects described herein, the two or more therapeutic agents are administered simultaneously or sequentially, in either order. For example, a first therapeutic agent can be administered immediately, up to 1 hour, up to 2 hours, up to 3 hours, up to 4 hours, up to 5 hours, up to 6 hours, up to 7 hours, up to, 8 hours, up to 9 hours, up to 10 hours, up to 11 hours, up to 12 hours, up to 13 hours, 14 hours, up to hours 16, up to 17 hours, up 18 hours, up to 19 hours up to 20 hours, up to 21 hours, up to 22 hours, up to 23 hours up to 24 hours or up to 1-7, 1-14, 1-21 or 1-30 days before or after one or more of the additional therapeutic agents.

[0304] V. Pharmaceutical Compositions

[0305] The oligonucleotides described herein are formulated into pharmaceutical compositions for administration to human subjects in a biologically compatible form suitable for administration in vivo.

[0306] The compounds described herein can be used in the form of the free base, in the form of salts, solvates, and as prodrugs. All forms are within the methods described herein. In accordance with the methods described herein, the described oligonucleotides or salts, solvates, or prodrugs thereof can be administered to a patient in a variety of forms depending on the selected route of administration, as will be understood by those skilled in the art. The compounds described herein can be administered, for example, by oral, parenteral, intrathecal, intracerebroventricular, intraparenchymal, buccal, sublingual, nasal, rectal, patch, pump, or transdermal administration and the pharmaceutical compositions formulated accordingly. Parenteral administration includes intravenous, intraperitoneal, subcutaneous, intramuscular, transepithelial, nasal, intrapulmonary, intrathecal, intracerebroventricular, intraparenchymal, rectal, and topical modes of administration. Parenteral administration can be by continuous infusion over a selected period of time.

[0307] A compound described herein can be orally administered, for example, with an inert diluent or with an assimilable edible carrier, or it can be enclosed in hard or soft shell gelatin capsules, or it can be compressed into tablets, or it can be incorporated directly with the food of the diet. For oral therapeutic administration, a compound described herein can be incorporated with an excipient and used in the form of ingestible tablets, buccal tablets, troches, capsules, elixirs, suspensions, syrups, and wafers. A compound described herein can be administered parenterally. Solutions of a compound described herein can be prepared in water suitably mixed with a surfactant, such as hydroxypropylcellulose. Dispersions can be prepared in glycerol, liquid polyethylene glycols, DMSO, and mixtures thereof with or without alcohol, and in oils. Under ordinary conditions of storage and use, these preparations can contain a preservative to prevent the growth of microorganisms. Conventional procedures and ingredients for the selection and preparation of suitable formulations are described, for example, in Remington's Pharmaceutical Sciences (2012, 22nd ed.) and in The United States Pharmacopeia: The National Formulary (USP 41 NF 36), published in 2018. The pharmaceutical forms suitable for injectable use include sterile aqueous solutions or dispersions and sterile powders for the extemporaneous preparation of sterile injectable solutions or dispersions. In all cases the form must be sterile and must be fluid to the extent that can be easily administered via syringe. Compositions for nasal administration can conveniently be formulated as aerosols, drops, gels, and powders. Aerosol formulations typically include a solution or fine suspension of the active substance in a physiologically acceptable aqueous or non-aqueous solvent and are usually presented in single or multidose quantities in sterile form in a sealed container, which can take the form of a cartridge or refill for use with an atomizing device. Alternatively, the sealed container can be a unitary dispensing device, such as a single dose nasal inhaler or an aerosol dispenser fitted with a metering valve which is intended for disposal after use. Where the dosage form includes an aerosol dispenser, it will contain a propellant, which can be a compressed gas, such as compressed air or an organic propellant, such as fluorochlorohydrocarbon. The aerosol dosage forms can take the form of a pump-atomizer. Compositions suitable for buccal or sublingual administration include tablets, lozenges, and pastilles, where the active ingredient is formulated with a carrier, such as sugar, acacia, tragacanth, gelatin, and glycerine. Compositions for rectal administration are conveniently in the form of suppositories containing a conventional suppository base, such as cocoa butter

[0308] The compounds described herein can be administered to an animal, e.g., a human, alone or in combination with pharmaceutically acceptable carriers, as noted herein, the proportion of which is determined by the solubility and chemical nature of the compound, chosen route of administration, and standard pharmaceutical practice.

[0309] VI. Dosages

[0310] The dosage of the compositions (e.g., a composition including an oligonucleotide) described herein, can vary depending on many factors, such as the pharmacodynamic properties of the compound; the mode of administration; the age, health, and weight of the recipient; the nature and extent of the symptoms; the frequency of the treatment, and the type of concurrent treatment, if any;

[0311] and the clearance rate of the compound in the animal to be treated. The compositions described herein can be administered initially in a suitable dosage that can be adjusted as required, depending on the clinical response. In some aspects, the dosage of a composition (e.g., a composition including an oligonucleotide) is a prophylactically or a therapeutically effective amount.

[0312] VII. Kits

[0313] Kits including (a) a pharmaceutical composition including an oligonucleotide agent that reduces the level and/or activity of MSH3 in a cell or subject described herein, and (b) a package insert with instructions to perform any of the methods described herein are contemplated. In some aspects, the kit includes (a) a pharmaceutical composition including an oligonucleotide agent that reduces the level and/or activity of MSH3 in a cell or subject described herein, (b) an additional therapeutic agent, and (c) a package insert with instructions to perform any of the methods described herein.

### EXAMPLES

### Example 1. Design and Selection of Antisense Oligonucleotides

[0314] Identification and selection of target transcripts: Target transcript selection and off-target scoring (below) utilized NCBI RefSeq sequences, downloaded from NCBI 21 Nov. 2018. Experimentally validated “NM” transcript models were used except for cynomolgus monkey, which only has “XM” predicted models for the large majority of genes. The longest human, mouse, rat, and cynomolgus monkey MSH3 transcript that contained all mapped internal exons was selected (SEQ IDs 1, 3, 4, and 5 for human, mouse, rat, and cynomolgus monkey, respectively, SEQ ID NO:2 is the protein sequence).

[0315] Selection of 20mer oligonucleotide sequences: All antisense 20mer sub-sequences per transcript were generated. Candidate antisense oligonucleotides (“ASOs”) were selected that met the following thermodynamic and physical characteristics determined by the inventors: predicted melting temperature of ASO:target duplex (“Tₘ”) of 30-65° C., predicted melting temperature of hairpins (“Tₕₐᵢᵣₚᵢₙ”)<35° C., predicted melting temperature of homopolymer formation (“Tₕₒₘₒ”)<25° C., GC content of 20-60%, no G homopolymers 4 or longer, and no A, T, or C homopolymers of 6 or longer. These selected or “preferred” oligonucleotides were further evaluated for specificity (off-target scoring, below).

[0316] Off-target scoring: The specificity of the preferred ASOs was evaluated via alignment to all unspliced RefSeq transcripts (“NM” models for human, mouse, and rat; “NM” and “XM” models for cynomolgus monkey), using the FASTA algorithm with an E value cutoff of 1000. The number of mismatches between each ASO and each transcript (per species) was tallied. An “off-target score” for each ASO in each species was calculated as the lowest number of mismatches to any transcript other than those encoded by the MSH3 gene.

[0317] Selection of ASOs for screening: A set of 480 preferred ASOs was selected for screening according to both specificity and ASO:mRNA (target) hybridization energy maximization information as follows. All candidate ASOs were evaluated for delta G of hybridization with the predicted target mRNA secondary structure (ΔG^{overall}) according to Xu and Mathews (Methods Mol Biol. 1490:15-34 (2016)). Next, two subsets of ASOs were chosen: First, 69 ASOs that matched human, cyno, and mouse target transcripts, had off-target scores of at least 1 in three species, and negative ΔG^{overall}; second, 411 ASOs that matched human and cyno target transcripts, had off-target scores of at least 2 in both species, and ΔG^{overall} less than −9.5 degrees Celsius.

[0318] The sequences, positions in human transcript, conservation in other species and species-specific off-target scores of each ASO are given in Table 2. Wherever indicated as “NC”, the ASO does not match the MSH3 gene in that species, and therefore off-target scores were not generated.

[0319] ASOs were synthesized as 5-10-5 “flanking sequence—DNA core sequence-flanking sequence” antisense oligonucleotides, with ribonucleotides at positions 1-5 and 16-20 and deoxyribonucleotides at positions 6-15, and with the following generic structure:

[0320] 5′-NmsNmsNmsNmsNms NsNsNsNsNs NsNsNsNsNs NmsNmsNmsNmsNm-3′

wherein:

[0321] Nm: 2′-MOE residues (including 5methyl-2′-MOE-C and 5methyl-2′-MOE-U)

[0322] N: DNA/RNA residues

[0323] s: phosphorothioate (the backbone is fully phosphorothioate-modified)

[0324] All “C” within the DNA core (positions 6-15) are 5′-Methyl-2′-MOE-dC

[0325] All “T” in positions 1-5 or 16-20 are 5′-methyl-2′-MOE-U.

For primary screens at 2 nM and 20 nM, desalted oligonucleotides were used. For detailed characterization of a subset of oligonucleotides, oligonucleotides were further purified by HPLC.

TABLE 2
Exemplary Oligonucleotides

| SEQ | | | | | | |
|---|---|---|---|---|---|---|
| ID | Posi- | | Off-target Score | | | |
| NO | tion | Sequence | Human | Cyno | Mouse | Rat |
| 6 | 67 | AGACATGGCAGGGCAAGGAT | 2 | 2 | NC | NC |
| 7 | 134 | TCAAAACCGCTTGCCTCGCA | 3 | NC | NC | NC |
| 8 | 146 | GGAAGAATCGGCTCAAAACC | 2 | NC | NC | NC |
| 9 | 147 | TGGAAGAATCGGCTCAAAAC | 3 | 2 | NC | NC |
| 10 | 148 | CTGGAAGAATCGGCTCAAAA | 3 | 3 | NC | NC |
| 11 | 149 | ACTGGAAGAATCGGCTCAAA | 2 | 2 | NC | NC |
| 12 | 150 | GACTGGAAGAATCGGCTCAA | 2 | 2 | NC | NC |
| 13 | 151 | AGACTGGAAGAATCGGCTCA | 2 | 2 | NC | NC |
| 14 | 152 | TAGACTGGAAGAATCGGCTC | 2 | 2 | NC | NC |
| 15 | 153 | GTAGACTGGAAGAATCGGCT | 2 | 2 | NC | NC |
| 16 | 154 | CGTAGACTGGAAGAATCGGC | 3 | 2 | NC | NC |
| 17 | 155 | CCGTAGACTGGAAGAATCGG | 3 | 3 | NC | NC |
| 18 | 156 | CCCGTAGACTGGAAGAATCG | 2 | 3 | NC | NC |
| 19 | 157 | TCCCGTAGACTGGAAGAATC | 3 | 3 | NC | NC |
| 20 | 158 | TTCCCGTAGACTGGAAGAAT | 2 | 2 | NC | NC |
| 21 | 162 | AGGCTTCCCGTAGACTGGAA | 2 | 2 | NC | NC |
| 22 | 166 | TTTCAGGCTTCCCGTAGACT | 3 | 3 | NC | NC |
| 23 | 167 | ATTTCAGGCTTCCCGTAGAC | 2 | 2 | NC | NC |
| 24 | 168 | GATTTCAGGCTTCCCGTAGA | 2 | 2 | NC | NC |
| 25 | 169 | GGATTTCAGGCTTCCCGTAG | 3 | 3 | NC | NC |
| 26 | 170 | TGGATTTCAGGCTTCCCGTA | 2 | 2 | NC | NC |
| 27 | 171 | GTGGATTTCAGGCTTCCCGT | 2 | 3 | NC | NC |
| 28 | 173 | AGGTGGATTTCAGGCTTCCC | 2 | 3 | NC | NC |
| 29 | 174 | GAGGTGGATTTCAGGCTTCC | 2 | 2 | NC | NC |
| 30 | 175 | GGAGGTGGATTTCAGGCTTC | 1 | 2 | NC | NC |
| 31 | 176 | AGGAGGTGGATTTCAGGCTT | 2 | 2 | NC | NC |
| 32 | 177 | GAGGAGGTGGATTTCAGGCT | 2 | 2 | NC | NC |
| 33 | 179 | AGGAGGAGGTGGATTTCAGG | 2 | NC | NC | NC |
| 34 | 180 | GAGGAGGAGGTGGATTTCAG | 1 | NC | NC | NC |
| 35 | 181 | GGAGGAGGAGGTGGATTTCA | 1 | NC | NC | NC |
| 36 | 182 | TGGAGGAGGAGGTGGATTTC | 2 | NC | NC | NC |
| 37 | 183 | GTGGAGGAGGAGGTGGATTT | 1 | NC | NC | NC |
| 38 | 184 | TGTGGAGGAGGAGGTGGATT | 2 | NC | NC | NC |
| 39 | 312 | TCAATTTCTGTAGCTATGTG | 2 | NC | NC | NC |
| 40 | 313 | GTCAATTTCTGTAGCTATGT | 1 | NC | NC | NC |
| 41 | 314 | TGTCAATTTCTGTAGCTATG | 1 | NC | NC | NC |
| 42 | 315 | CTGTCAATTTCTGTAGCTAT | 2 | NC | NC | NC |
| 43 | 316 | TCTGTCAATTTCTGTAGCTA | 2 | NC | NC | NC |
| 44 | 317 | TTCTGTCAATTTCTGTAGCT | 1 | NC | NC | NC |
| 45 | 318 | CTTCTGTCAATTTCTGTAGC | 1 | NC | NC | NC |
| 46 | 319 | TCTTCTGTCAATTTCTGTAG | 1 | NC | NC | NC |
| 47 | 320 | TTCTTCTGTCAATTTCTGTA | 1 | NC | NC | NC |
| 48 | 321 | TTTCTTCTGTCAATTTCTGT | 2 | NC | NC | NC |
| 49 | 322 | CTTTCTTCTGTCAATTTCTG | 1 | NC | NC | NC |
| 50 | 323 | TCTTTCTTCTGTCAATTTCT | 1 | NC | NC | NC |
| 51 | 324 | TTCTTTCTTCTGTCAATTTC | 1 | NC | NC | NC |
| 52 | 325 | CTTCTTTCTTCTGTCAATTT | 2 | NC | NC | NC |
| 53 | 326 | TCTTCTTTCTTCTGTCAATT | 1 | NC | NC | NC |
| 54 | 327 | CTCTTCTTTCTTCTGTCAAT | 1 | NC | NC | NC |
| 55 | 328 | TCTCTTCTTTCTTCTGTCAA | 1 | NC | NC | NC |
| 56 | 329 | GTCTCTTCTTTCTTCTGTCA | 1 | NC | NC | NC |
| 57 | 330 | GGTCTCTTCTTTCTTCTGTC | 1 | NC | NC | NC |
| 58 | 331 | TGGTCTCTTCTTTCTTCTGT | 2 | NC | NC | NC |
| 59 | 332 | ATGGTCTCTTCTTTCTTCTG | 2 | NC | NC | NC |
| 60 | 333 | AATGGTCTCTTCTTTCTTCT | 2 | NC | NC | NC |
| 61 | 334 | CAATGGTCTCTTCTTTCTTC | 2 | NC | NC | NC |
| 62 | 335 | CCAATGGTCTCTTCTTTCTT | 2 | NC | NC | NC |
| 63 | 336 | TCCAATGGTCTCTTCTTTCT | 1 | NC | NC | NC |
| 64 | 337 | TTCCAATGGTCTCTTCTTTC | 1 | NC | NC | NC |
| 65 | 338 | TTTCCAATGGTCTCTTCTTT | 1 | NC | NC | NC |
| 66 | 339 | TTTTCCAATGGTCTCTTCTT | 1 | 1 | NC | NC |
| 67 | 340 | ATTTTCCAATGGTCTCTTCT | 1 | 0 | NC | NC |
| 68 | 341 | CATTTTCCAATGGTCTCTTC | 1 | 1 | NC | NC |
| 69 | 350 | CAGGCCCATCATTTTCCAAT | 2 | 1 | NC | NC |
| 70 | 351 | ACAGGCCCATCATTTTCCAA | 2 | 1 | NC | NC |
| 71 | 352 | AACAGGCCCATCATTTTCCA | 2 | 1 | NC | NC |
| 72 | 353 | TAACAGGCCCATCATTTTCC | 2 | 1 | NC | NC |
| 73 | 354 | TTAACAGGCCCATCATTTTC | 2 | 2 | NC | NC |
| 74 | 355 | TTTAACAGGCCCATCATTTT | 2 | 2 | NC | NC |
| 75 | 356 | TTTTAACAGGCCCATCATTT | 1 | 2 | NC | NC |
| 76 | 357 | TTTTTAACAGGCCCATCATT | 2 | 2 | NC | NC |
| 77 | 358 | CTTTTTAACAGGCCCATCAT | 2 | 2 | NC | NC |
| 78 | 359 | TCTTTTTAACAGGCCCATCA | 2 | 2 | NC | NC |
| 79 | 360 | TTCTTTTTAACAGGCCCATC | 2 | 2 | NC | NC |
| 80 | 361 | TTTCTTTTTAACAGGCCCAT | 2 | 1 | NC | NC |
| 81 | 362 | CTTTCTTTTTAACAGGCCCA | 2 | 2 | NC | NC |
| 82 | 363 | ACTTTCTTTTTAACAGGCCC | 2 | 2 | NC | NC |
| 83 | 364 | TACTTTCTTTTTAACAGGCC | 1 | 1 | NC | NC |
| 84 | 365 | TTACTTTCTTTTTAACAGGC | 1 | 1 | NC | NC |
| 85 | 366 | TTTACTTTCTTTTTAACAGG | 1 | 2 | NC | NC |
| 86 | 367 | CTTTACTTTCTTTTTAACAG | 2 | 1 | NC | NC |
| 87 | 373 | GACTTTCTTTACTTTCTTTT | 1 | NC | NC | NC |
| 88 | 374 | GGACTTTCTTTACTTTCTTT | 1 | NC | NC | NC |
| 89 | 375 | TGGACTTTCTTTACTTTCTT | 1 | NC | NC | NC |
| 90 | 376 | TTGGACTTTCTTTACTTTCT | 1 | NC | NC | NC |
| 91 | 377 | GTTGGACTTTCTTTACTTTC | 2 | NC | NC | NC |
| 92 | 378 | TGTTGGACTTTCTTTACTTT | 1 | NC | NC | NC |
| 93 | 379 | TTGTTGGACTTTCTTTACTT | 1 | NC | NC | NC |
| 94 | 380 | TTTGTTGGACTTTCTTTACT | 1 | NC | NC | NC |
| 95 | 381 | TTTTGTTGGACTTTCTTTAC | 1 | NC | NC | NC |
| 96 | 382 | CTTTTGTTGGACTTTCTTTA | 1 | NC | NC | NC |
| 97 | 383 | CCTTTTGTTGGACTTTCTTT | 2 | NC | NC | NC |
| 98 | 384 | TCCTTTTGTTGGACTTTCTT | 2 | NC | NC | NC |
| 99 | 385 | TTCCTTTTGTTGGACTTTCT | 2 | NC | NC | NC |
| 100 | 386 | CTTCCTTTTGTTGGACTTTC | 2 | NC | NC | NC |
| 101 | 387 | CCTTCCTTTTGTTGGACTTT | 2 | NC | NC | NC |
| 102 | 388 | TCCTTCCTTTTGTTGGACTT | 2 | NC | NC | NC |
| 103 | 389 | CTCCTTCCTTTTGTTGGACT | 2 | NC | NC | NC |
| 104 | 390 | CCTCCTTCCTTTTGTTGGAC | 2 | NC | NC | NC |
| 105 | 391 | TCCTCCTTCCTTTTGTTGGA | 2 | NC | NC | NC |
| 106 | 392 | TTCCTCCTTCCTTTTGTTGG | 1 | 2 | NC | NC |
| 107 | 393 | CTTCCTCCTTCCTTTTGTTG | 1 | 1 | NC | NC |
| 108 | 394 | ACTTCCTCCTTCCTTTTGTT | 1 | 1 | NC | NC |
| 109 | 395 | CACTTCCTCCTTCCTTTTGT | 1 | 1 | NC | NC |
| 110 | 396 | TCACTTCCTCCTTCCTTTTG | 2 | 1 | NC | NC |
| 111 | 397 | ATCACTTCCTCCTTCCTTTT | 1 | 1 | NC | NC |
| 112 | 398 | GATCACTTCCTCCTTCCTTT | 1 | 2 | NC | NC |
| 113 | 399 | AGATCACTTCCTCCTTCCTT | 1 | 2 | NC | NC |
| 114 | 400 | CAGATCACTTCCTCCTTCCT | 2 | 2 | NC | NC |
| 115 | 401 | CCAGATCACTTCCTCCTTCC | 2 | 2 | NC | NC |
| 116 | 402 | CCCAGATCACTTCCTCCTTC | 2 | 1 | NC | NC |
| 117 | 403 | TCCCAGATCACTTCCTCCTT | 2 | 2 | NC | NC |
| 118 | 404 | TTCCCAGATCACTTCCTCCT | 2 | 2 | NC | NC |
| 119 | 405 | ATTCCCAGATCACTTCCTCC | 1 | 2 | NC | NC |
| 120 | 406 | CATTCCCAGATCACTTCCTC | 2 | 2 | NC | NC |
| 121 | 407 | ACATTCCCAGATCACTTCCT | 1 | 1 | NC | NC |
| 122 | 408 | GACATTCCCAGATCACTTCC | 2 | 1 | NC | NC |
| 123 | 409 | AGACATTCCCAGATCACTTC | 2 | 2 | NC | NC |
| 124 | 410 | CAGACATTCCCAGATCACTT | 2 | 2 | NC | NC |
| 125 | 411 | CCAGACATTCCCAGATCACT | 2 | 2 | NC | NC |
| 126 | 412 | GCCAGACATTCCCAGATCAC | 2 | 3 | NC | NC |
| 127 | 413 | TGCCAGACATTCCCAGATCA | 2 | 2 | NC | NC |
| 128 | 414 | TTGCCAGACATTCCCAGATC | 2 | 2 | NC | NC |
| 129 | 415 | GTTGCCAGACATTCCCAGAT | 2 | 2 | NC | NC |
| 130 | 416 | AGTTGCCAGACATTCCCAGA | 2 | 2 | NC | NC |
| 131 | 417 | GAGTTGCCAGACATTCCCAG | 2 | 2 | NC | NC |
| 132 | 418 | AGAGTTGCCAGACATTCCCA | 2 | 2 | NC | NC |
| 133 | 419 | CAGAGTTGCCAGACATTCCC | 2 | 2 | NC | NC |
| 134 | 420 | TCAGAGTTGCCAGACATTCC | 2 | 2 | NC | NC |
| 135 | 421 | CTCAGAGTTGCCAGACATTC | 2 | 1 | NC | NC |
| 136 | 422 | GCTCAGAGTTGCCAGACATT | 1 | 1 | NC | NC |
| 137 | 430 | TTTCTTTGGCTCAGAGTTGC | 1 | 1 | NC | NC |
| 138 | 431 | ATTTCTTTGGCTCAGAGTTG | 1 | 1 | NC | NC |
| 139 | 432 | CATTTCTTTGGCTCAGAGTT | 1 | 1 | NC | NC |
| 140 | 433 | ACATTTCTTTGGCTCAGAGT | 1 | 2 | NC | NC |
| 141 | 434 | GACATTTCTTTGGCTCAGAG | 1 | 2 | NC | NC |
| 142 | 435 | AGACATTTCTTTGGCTCAGA | 1 | 2 | NC | NC |
| 143 | 436 | CAGACATTTCTTTGGCTCAG | 2 | 2 | NC | NC |
| 144 | 437 | TCAGACATTTCTTTGGCTCA | 2 | 2 | NC | NC |
| 145 | 438 | CTCAGACATTTCTTTGGCTC | 2 | 2 | NC | NC |
| 146 | 439 | CCTCAGACATTTCTTTGGCT | 2 | 1 | NC | NC |
| 147 | 440 | TCCTCAGACATTTCTTTGGC | 2 | 2 | NC | NC |
| 148 | 454 | TGAAACATTCCTGGTCCTCA | 2 | NC | NC | NC |
| 149 | 455 | TTGAAACATTCCTGGTCCTC | 1 | NC | NC | NC |
| 150 | 456 | TTTGAAACATTCCTGGTCCT | 2 | NC | NC | NC |
| 151 | 457 | CTTTGAAACATTCCTGGTCC | 2 | NC | NC | NC |
| 152 | 458 | ACTTTGAAACATTCCTGGTC | 2 | NC | NC | NC |
| 153 | 459 | GACTTTGAAACATTCCTGGT | 2 | NC | NC | NC |
| 154 | 460 | AGACTTTGAAACATTCCTGG | 1 | NC | NC | NC |
| 155 | 461 | GAGACTTTGAAACATTCCTG | 2 | NC | NC | NC |
| 156 | 462 | AGAGACTTTGAAACATTCCT | 2 | NC | NC | NC |
| 157 | 463 | CAGAGACTTTGAAACATTCC | 2 | NC | NC | NC |
| 158 | 464 | CCAGAGACTTTGAAACATTC | 2 | NC | NC | NC |
| 159 | 465 | TCCAGAGACTTTGAAACATT | 2 | NC | NC | NC |
| 160 | 466 | TTCCAGAGACTTTGAAACAT | 2 | NC | NC | NC |
| 161 | 467 | TTTCCAGAGACTTTGAAACA | 2 | NC | NC | NC |
| 162 | 468 | TTTTCCAGAGACTTTGAAAC | 1 | NC | NC | NC |
| 163 | 469 | TTTTTCCAGAGACTTTGAAA | 2 | NC | NC | NC |
| 164 | 470 | ATTTTTCCAGAGACTTTGAA | 2 | NC | NC | NC |
| 165 | 471 | AATTTTTCCAGAGACTTTGA | 2 | NC | NC | NC |
| 166 | 472 | CAATTTTTCCAGAGACTTTG | 2 | NC | NC | NC |
| 167 | 473 | TCAATTTTTCCAGAGACTTT | 2 | 2 | NC | NC |
| 168 | 474 | TTCAATTTTTCCAGAGACTT | 2 | 2 | NC | NC |
| 169 | 475 | TTTCAATTTTTCCAGAGACT | 1 | 2 | NC | NC |
| 170 | 476 | CTTTCAATTTTTCCAGAGAC | 1 | 2 | NC | NC |
| 171 | 477 | TCTTTCAATTTTTCCAGAGA | 1 | 2 | NC | NC |
| 172 | 478 | TTCTTTCAATTTTTCCAGAG | 1 | 2 | NC | NC |
| 173 | 479 | ATTCTTTCAATTTTTCCAGA | 2 | 2 | NC | NC |
| 174 | 480 | AATTCTTTCAATTTTTCCAG | 1 | 1 | NC | NC |
| 175 | 481 | GAATTCTTTCAATTTTTCCA | 1 | 1 | NC | NC |
| 176 | 482 | AGAATTCTTTCAATTTTTCC | 1 | 1 | NC | NC |
| 177 | 483 | CAGAATTCTTTCAATTTTTC | 1 | 0 | NC | NC |
| 178 | 484 | GCAGAATTCTTTCAATTTTT | 2 | 0 | NC | NC |
| 179 | 485 | AGCAGAATTCTTTCAATTTT | 2 | 1 | NC | NC |
| 180 | 486 | CAGCAGAATTCTTTCAATTT | 2 | 1 | NC | NC |
| 181 | 487 | GCAGCAGAATTCTTTCAATT | 2 | NC | NC | NC |
| 182 | 488 | CGCAGCAGAATTCTTTCAAT | 2 | NC | NC | NC |
| 183 | 489 | TCGCAGCAGAATTCTTTCAA | 2 | NC | NC | NC |
| 184 | 490 | ATCGCAGCAGAATTCTTTCA | 2 | NC | NC | NC |
| 185 | 491 | AATCGCAGCAGAATTCTTTC | 2 | NC | NC | NC |
| 186 | 492 | GAATCGCAGCAGAATTCTTT | 2 | NC | NC | NC |
| 187 | 493 | AGAATCGCAGCAGAATTCTT | 2 | NC | NC | NC |
| 188 | 494 | CAGAATCGCAGCAGAATTCT | 2 | NC | NC | NC |
| 189 | 495 | GCAGAATCGCAGCAGAATTC | 3 | NC | NC | NC |
| 190 | 496 | GGCAGAATCGCAGCAGAATT | 2 | NC | NC | NC |
| 191 | 497 | GGGCAGAATCGCAGCAGAAT | 3 | NC | NC | NC |
| 192 | 498 | AGGGCAGAATCGCAGCAGAA | 2 | NC | NC | NC |
| 193 | 499 | AAGGGCAGAATCGCAGCAGA | 2 | NC | NC | NC |
| 194 | 504 | TGAGGAAGGGCAGAATCGCA | 2 | NC | NC | NC |
| 195 | 505 | TTGAGGAAGGGCAGAATCGC | 3 | NC | NC | NC |
| 196 | 506 | TTTGAGGAAGGGCAGAATCG | 2 | NC | NC | NC |
| 197 | 507 | CTTTGAGGAAGGGCAGAATC | 1 | 2 | NC | NC |
| 198 | 521 | CTGTCTGGACTCTACTTTGA | 1 | 2 | NC | NC |
| 199 | 522 | TCTGTCTGGACTCTACTTTG | 1 | 2 | NC | NC |
| 200 | 523 | TTCTGTCTGGACTCTACTTT | 2 | 2 | NC | NC |
| 201 | 524 | ATTCTGTCTGGACTCTACTT | 2 | 2 | NC | NC |
| 202 | 525 | GATTCTGTCTGGACTCTACT | 1 | 2 | NC | NC |
| 203 | 526 | AGATTCTGTCTGGACTCTAC | 2 | 2 | NC | NC |
| 204 | 527 | GAGATTCTGTCTGGACTCTA | 2 | 2 | NC | NC |
| 205 | 528 | AGAGATTCTGTCTGGACTCT | 2 | 2 | NC | NC |
| 206 | 529 | CAGAGATTCTGTCTGGACTC | 2 | 2 | NC | NC |
| 207 | 548 | GAACTGCAAATCTCTCCTGC | 1 | 2 | NC | NC |
| 208 | 549 | AGAACTGCAAATCTCTCCTG | 1 | 2 | NC | NC |
| 209 | 550 | CAGAACTGCAAATCTCTCCT | 2 | 2 | NC | NC |
| 210 | 562 | AGTACATTTTGGCAGAACTG | 2 | 2 | NC | NC |
| 211 | 563 | CAGTACATTTTGGCAGAACT | 1 | 2 | NC | NC |
| 212 | 564 | TCAGTACATTTTGGCAGAAC | 2 | 2 | NC | NC |
| 213 | 565 | ATCAGTACATTTTGGCAGAA | 2 | 2 | NC | NC |
| 214 | 566 | AATCAGTACATTTTGGCAGA | 2 | 2 | NC | NC |
| 215 | 567 | AAATCAGTACATTTTGGCAG | 2 | 2 | NC | NC |
| 216 | 568 | AAAATCAGTACATTTTGGCA | 2 | 1 | NC | NC |
| 217 | 572 | CATCAAAATCAGTACATTTT | 1 | 2 | NC | NC |
| 218 | 573 | TCATCAAAATCAGTACATTT | 1 | 1 | NC | NC |
| 219 | 574 | ATCATCAAAATCAGTACATT | 1 | 2 | NC | NC |
| 220 | 575 | TATCATCAAAATCAGTACAT | 1 | 1 | NC | NC |
| 221 | 576 | ATATCATCAAAATCAGTACA | 2 | 2 | NC | NC |
| 222 | 577 | GATATCATCAAAATCAGTAC | 2 | 2 | NC | NC |
| 223 | 578 | TGATATCATCAAAATCAGTA | 2 | 2 | NC | NC |
| 224 | 588 | TGTAGAAGACTGATATCATC | 1 | NC | NC | NC |
| 225 | 589 | GTGTAGAAGACTGATATCAT | 2 | NC | NC | NC |
| 226 | 590 | CGTGTAGAAGACTGATATCA | 3 | NC | NC | NC |
| 227 | 591 | GCGTGTAGAAGACTGATATC | 3 | NC | NC | NC |
| 228 | 592 | TGCGTGTAGAAGACTGATAT | 2 | NC | NC | NC |
| 229 | 593 | TTGCGTGTAGAAGACTGATA | 3 | NC | NC | NC |
| 230 | 594 | TTTGCGTGTAGAAGACTGAT | 3 | NC | NC | NC |
| 231 | 595 | CTTTGCGTGTAGAAGACTGA | 2 | NC | NC | NC |
| 232 | 596 | TCTTTGCGTGTAGAAGACTG | 3 | NC | NC | NC |
| 233 | 597 | TTCTTTGCGTGTAGAAGACT | 2 | NC | NC | NC |
| 234 | 598 | ATTCTTTGCGTGTAGAAGAC | 3 | NC | NC | NC |
| 235 | 599 | CATTCTTTGCGTGTAGAAGA | 2 | NC | NC | NC |
| 236 | 614 | CTTCAGAAGAAACTGCATTC | 2 | 2 | NC | NC |
| 237 | 615 | TCTTCAGAAGAAACTGCATT | 1 | 2 | NC | NC |
| 238 | 625 | ACGTTTCGAATCTTCAGAAG | 2 | NC | NC | NC |
| 239 | 626 | GACGTTTCGAATCTTCAGAA | 3 | NC | NC | NC |
| 240 | 627 | TGACGTTTCGAATCTTCAGA | 3 | NC | NC | NC |
| 241 | 628 | TTGACGTTTCGAATCTTCAG | 3 | NC | NC | NC |
| 242 | 629 | TTTGACGTTTCGAATCTTCA | 3 | NC | NC | NC |
| 243 | 630 | ATTTGACGTTTCGAATCTTC | 3 | NC | NC | NC |
| 244 | 631 | AATTTGACGTTTCGAATCTT | 2 | NC | NC | NC |
| 245 | 632 | TAATTTGACGTTTCGAATCT | 2 | NC | NC | NC |
| 246 | 633 | TTAATTTGACGTTTCGAATC | 3 | NC | NC | NC |
| 247 | 634 | ATTAATTTGACGTTTCGAAT | 2 | NC | NC | NC |
| 248 | 635 | GATTAATTTGACGTTTCGAA | 2 | NC | NC | NC |
| 249 | 636 | TGATTAATTTGACGTTTCGA | 2 | NC | NC | NC |
| 250 | 637 | TTGATTAATTTGACGTTTCG | 2 | NC | NC | NC |
| 251 | 638 | TTTGATTAATTTGACGTTTC | 2 | NC | NC | NC |
| 252 | 640 | CTTTTGATTAATTTGACGTT | 3 | NC | NC | NC |
| 253 | 641 | CCTTTTGATTAATTTGACGT | 2 | NC | NC | NC |
| 254 | 642 | TCCTTTTGATTAATTTGACG | 2 | NC | NC | NC |
| 255 | 643 | GTCCTTTTGATTAATTTGAC | 1 | NC | NC | NC |
| 256 | 644 | TGTCCTTTTGATTAATTTGA | 2 | NC | NC | NC |
| 257 | 645 | GTGTCCTTTTGATTAATTTG | 2 | NC | NC | NC |
| 258 | 646 | TGTGTCCTTTTGATTAATTT | 2 | NC | NC | NC |
| 259 | 647 | TTGTGTCCTTTTGATTAATT | 2 | NC | NC | NC |
| 260 | 648 | GTTGTGTCCTTTTGATTAAT | 2 | NC | NC | NC |
| 261 | 649 | TGTTGTGTCCTTTTGATTAA | 2 | NC | NC | NC |
| 262 | 650 | GTGTTGTGTCCTTTTGATTA | 2 | NC | NC | NC |
| 263 | 651 | AGTGTTGTGTCCTTTTGATT | 2 | NC | NC | NC |
| 264 | 652 | AAGTGTTGTGTCCTTTTGAT | 2 | NC | NC | NC |
| 265 | 653 | AAAGTGTTGTGTCCTTTTGA | 1 | NC | NC | NC |
| 266 | 654 | AAAAGTGTTGTGTCCTTTTG | 1 | NC | NC | NC |
| 267 | 656 | CAAAAAGTGTTGTGTCCTTT | 1 | NC | NC | NC |
| 268 | 657 | TCAAAAAGTGTTGTGTCCTT | 1 | NC | NC | NC |
| 269 | 658 | ATCAAAAAGTGTTGTGTCCT | 1 | NC | NC | NC |
| 270 | 659 | GATCAAAAAGTGTTGTGTCC | 2 | NC | NC | NC |
| 271 | 660 | AGATCAAAAAGTGTTGTGTC | 2 | NC | NC | NC |
| 272 | 661 | GAGATCAAAAAGTGTTGTGT | 2 | NC | NC | NC |
| 273 | 662 | TGAGATCAAAAAGTGTTGTG | 2 | NC | NC | NC |
| 274 | 663 | CTGAGATCAAAAAGTGTTGT | 2 | NC | NC | NC |
| 275 | 664 | ACTGAGATCAAAAAGTGTTG | 2 | NC | NC | NC |
| 276 | 665 | GACTGAGATCAAAAAGTGTT | 2 | NC | NC | NC |
| 277 | 666 | TGACTGAGATCAAAAAGTGT | 2 | NC | NC | NC |
| 278 | 667 | CTGACTGAGATCAAAAAGTG | 2 | NC | NC | NC |
| 279 | 668 | ACTGACTGAGATCAAAAAGT | 1 | NC | NC | NC |
| 280 | 669 | AACTGACTGAGATCAAAAAG | 2 | NC | NC | NC |
| 281 | 670 | AAACTGACTGAGATCAAAAA | 2 | NC | NC | NC |
| 282 | 671 | CAAACTGACTGAGATCAAAA | 2 | NC | NC | NC |
| 283 | 672 | CCAAACTGACTGAGATCAAA | 2 | NC | NC | NC |
| 284 | 673 | TCCAAACTGACTGAGATCAA | 2 | NC | NC | NC |
| 285 | 674 | ATCCAAACTGACTGAGATCA | 2 | NC | NC | NC |
| 286 | 675 | GATCCAAACTGACTGAGATC | 1 | NC | NC | NC |
| 287 | 676 | TGATCCAAACTGACTGAGAT | 2 | NC | NC | NC |
| 288 | 677 | ATGATCCAAACTGACTGAGA | 1 | NC | NC | NC |
| 289 | 678 | GATGATCCAAACTGACTGAG | 2 | NC | NC | NC |
| 290 | 679 | TGATGATCCAAACTGACTGA | 2 | 2 | NC | NC |
| 291 | 680 | TTGATGATCCAAACTGACTG | 2 | 2 | NC | NC |
| 292 | 681 | TTTGATGATCCAAACTGACT | 2 | 2 | NC | NC |
| 293 | 682 | ATTTGATGATCCAAACTGAC | 2 | 2 | NC | NC |
| 294 | 683 | TATTTGATGATCCAAACTGA | 1 | 1 | NC | NC |
| 295 | 684 | GTATTTGATGATCCAAACTG | 2 | 2 | NC | NC |
| 296 | 685 | TGTATTTGATGATCCAAACT | 2 | 2 | NC | NC |
| 297 | 686 | TTGTATTTGATGATCCAAAC | 2 | 1 | NC | NC |
| 298 | 688 | ACTTGTATTTGATGATCCAA | 2 | 1 | NC | NC |
| 299 | 689 | GACTTGTATTTGATGATCCA | 2 | 2 | NC | NC |
| 300 | 690 | TGACTTGTATTTGATGATCC | 2 | 2 | NC | NC |
| 301 | 691 | ATGACTTGTATTTGATGATC | 2 | 2 | NC | NC |
| 302 | 692 | CATGACTTGTATTTGATGAT | 2 | 2 | NC | NC |
| 303 | 693 | TCATGACTTGTATTTGATGA | 2 | 2 | NC | NC |
| 304 | 694 | TTCATGACTTGTATTTGATG | 2 | 2 | NC | NC |
| 305 | 695 | TTTCATGACTTGTATTTGAT | 2 | 2 | NC | NC |
| 306 | 696 | TTTTCATGACTTGTATTTGA | 1 | 2 | NC | NC |
| 307 | 697 | ATTTTCATGACTTGTATTTG | 0 | 1 | NC | NC |
| 308 | 701 | GTAAATTTTCATGACTTGTA | 1 | 2 | NC | NC |
| 309 | 702 | TGTAAATTTTCATGACTTGT | 2 | 2 | NC | NC |
| 310 | 703 | CTGTAAATTTTCATGACTTG | 1 | 2 | NC | NC |
| 311 | 704 | TCTGTAAATTTTCATGACTT | 1 | 2 | NC | NC |
| 312 | 705 | TTCTGTAAATTTTCATGACT | 1 | 2 | NC | NC |
| 313 | 706 | TTTCTGTAAATTTTCATGAC | 1 | 2 | NC | NC |
| 314 | 708 | GTTTTCTGTAAATTTTCATG | 1 | 1 | NC | NC |
| 315 | 721 | TGATTTGGAAGCAGTTTTCT | 1 | NC | NC | NC |
| 316 | 730 | TTTGTTAGCTGATTTGGAAG | 2 | NC | NC | NC |
| 317 | 731 | GTTTGTTAGCTGATTTGGAA | 2 | NC | NC | NC |
| 318 | 732 | CGTTTGTTAGCTGATTTGGA | 2 | NC | NC | NC |
| 319 | 733 | CCGTTTGTTAGCTGATTTGG | 2 | NC | NC | NC |
| 320 | 734 | ACCGTTTGTTAGCTGATTTG | 2 | NC | NC | NC |
| 321 | 735 | GACCGTTTGTTAGCTGATTT | 2 | NC | NC | NC |
| 322 | 736 | GGACCGTTTGTTAGCTGATT | 2 | NC | NC | NC |
| 323 | 737 | TGGACCGTTTGTTAGCTGAT | 2 | NC | NC | NC |
| 324 | 738 | TTGGACCGTTTGTTAGCTGA | 2 | NC | NC | NC |
| 325 | 739 | TTTGGACCGTTTGTTAGCTG | 3 | NC | NC | NC |
| 326 | 740 | TTTTGGACCGTTTGTTAGCT | 3 | NC | NC | NC |
| 327 | 741 | CTTTTGGACCGTTTGTTAGC | 3 | NC | NC | NC |
| 328 | 742 | GCTTTTGGACCGTTTGTTAG | 3 | NC | NC | NC |
| 329 | 743 | TGCTTTTGGACCGTTTGTTA | 2 | NC | NC | NC |
| 330 | 744 | ATGCTTTTGGACCGTTTGTT | 2 | NC | NC | NC |
| 331 | 745 | GATGCTTTTGGACCGTTTGT | 2 | NC | NC | NC |
| 332 | 746 | AGATGCTTTTGGACCGTTTG | 2 | NC | NC | NC |
| 333 | 747 | TAGATGCTTTTGGACCGTTT | 3 | NC | NC | NC |
| 334 | 748 | ATAGATGCTTTTGGACCGTT | 3 | NC | NC | NC |
| 335 | 749 | TATAGATGCTTTTGGACCGT | 3 | NC | NC | NC |
| 336 | 750 | GTATAGATGCTTTTGGACCG | 2 | NC | NC | NC |
| 337 | 751 | CGTATAGATGCTTTTGGACC | 3 | NC | NC | NC |
| 338 | 752 | GCGTATAGATGCTTTTGGAC | 3 | NC | NC | NC |
| 339 | 753 | GGCGTATAGATGCTTTTGGA | 3 | NC | NC | NC |
| 340 | 754 | CGGCGTATAGATGCTTTTGG | 3 | NC | NC | NC |
| 341 | 755 | GCGGCGTATAGATGCTTTTG | 3 | NC | NC | NC |
| 342 | 756 | AGCGGCGTATAGATGCTTTT | 3 | NC | NC | NC |
| 343 | 757 | TAGCGGCGTATAGATGCTTT | 3 | NC | NC | NC |
| 344 | 758 | CTAGCGGCGTATAGATGCTT | 3 | NC | NC | NC |
| 345 | 759 | TCTAGCGGCGTATAGATGCT | 4 | NC | NC | NC |
| 346 | 760 | TTCTAGCGGCGTATAGATGC | 3 | NC | NC | NC |
| 347 | 761 | ATTCTAGCGGCGTATAGATG | 3 | NC | NC | NC |
| 348 | 762 | AATTCTAGCGGCGTATAGAT | 3 | NC | NC | NC |
| 349 | 763 | TAATTCTAGCGGCGTATAGA | 3 | NC | NC | NC |
| 350 | 764 | GTAATTCTAGCGGCGTATAG | 3 | NC | NC | NC |
| 351 | 765 | TGTAATTCTAGCGGCGTATA | 2 | 3 | NC | NC |
| 352 | 766 | TTGTAATTCTAGCGGCGTAT | 3 | 3 | NC | NC |
| 353 | 767 | ATTGTAATTCTAGCGGCGTA | 3 | 3 | NC | NC |
| 354 | 768 | TATTGTAATTCTAGCGGCGT | 3 | 3 | NC | NC |
| 355 | 769 | GTATTGTAATTCTAGCGGCG | 3 | 3 | NC | NC |
| 356 | 770 | TGTATTGTAATTCTAGCGGC | 3 | 3 | NC | NC |
| 357 | 771 | ATGTATTGTAATTCTAGCGG | 3 | 3 | NC | NC |
| 358 | 772 | TATGTATTGTAATTCTAGCG | 2 | 2 | NC | NC |
| 359 | 773 | CTATGTATTGTAATTCTAGC | 2 | 2 | NC | NC |
| 360 | 774 | TCTATGTATTGTAATTCTAG | 1 | 2 | NC | NC |
| 361 | 781 | CTTCATTTCTATGTATTGTA | 2 | 2 | NC | NC |
| 362 | 782 | GCTTCATTTCTATGTATTGT | 2 | 2 | NC | NC |
| 363 | 783 | TGCTTCATTTCTATGTATTG | 2 | 1 | NC | NC |
| 364 | 784 | CTGCTTCATTTCTATGTATT | 1 | 1 | NC | NC |
| 365 | 785 | GCTGCTTCATTTCTATGTAT | 2 | 2 | NC | NC |
| 366 | 786 | TGCTGCTTCATTTCTATGTA | 2 | 2 | NC | NC |
| 367 | 787 | CTGCTGCTTCATTTCTATGT | 1 | 1 | NC | NC |
| 368 | 788 | GCTGCTGCTTCATTTCTATG | 2 | 2 | NC | NC |
| 369 | 810 | ACACACAAAACTGCATCTTT | 1 | 2 | NC | NC |
| 370 | 811 | CACACACAAAACTGCATCTT | 1 | 1 | NC | NC |
| 371 | 812 | CCACACACAAAACTGCATCT | 2 | 1 | NC | NC |
| 372 | 813 | TCCACACACAAAACTGCATC | 2 | 2 | NC | NC |
| 373 | 814 | TTCCACACACAAAACTGCAT | 2 | 2 | NC | NC |
| 374 | 815 | ATTCCACACACAAAACTGCA | 2 | 2 | NC | NC |
| 375 | 816 | CATTCCACACACAAAACTGC | 1 | 2 | NC | NC |
| 376 | 817 | ACATTCCACACACAAAACTG | 1 | 1 | NC | NC |
| 377 | 818 | CACATTCCACACACAAAACT | 1 | 1 | NC | NC |
| 378 | 819 | CCACATTCCACACACAAAAC | 2 | 1 | NC | NC |
| 379 | 820 | TCCACATTCCACACACAAAA | 1 | 0 | NC | NC |
| 380 | 821 | ATCCACATTCCACACACAAA | 1 | 1 | NC | NC |
| 381 | 822 | TATCCACATTCCACACACAA | 2 | 1 | NC | NC |
| 382 | 823 | ATATCCACATTCCACACACA | 2 | 2 | NC | NC |
| 383 | 824 | TATATCCACATTCCACACAC | 2 | 1 | NC | NC |
| 384 | 825 | TTATATCCACATTCCACACA | 1 | 1 | NC | NC |
| 385 | 826 | CTTATATCCACATTCCACAC | 2 | 2 | NC | NC |
| 386 | 827 | ACTTATATCCACATTCCACA | 1 | 2 | NC | NC |
| 387 | 828 | TACTTATATCCACATTCCAC | 1 | 2 | NC | NC |
| 388 | 829 | ATACTTATATCCACATTCCA | 1 | 1 | NC | NC |
| 389 | 830 | TATACTTATATCCACATTCC | 1 | 2 | NC | NC |
| 390 | 831 | CTATACTTATATCCACATTC | 2 | 2 | NC | NC |
| 391 | 832 | TCTATACTTATATCCACATT | 1 | 1 | NC | NC |
| 392 | 833 | ATCTATACTTATATCCACAT | 2 | 2 | NC | NC |
| 393 | 834 | AATCTATACTTATATCCACA | 2 | 2 | NC | NC |
| 394 | 835 | GAATCTATACTTATATCCAC | 2 | 2 | NC | NC |
| 395 | 836 | AGAATCTATACTTATATCCA | 2 | 2 | NC | NC |
| 396 | 837 | AAGAATCTATACTTATATCC | 1 | 1 | NC | NC |
| 397 | 840 | CCAAAGAATCTATACTTATA | 2 | 2 | NC | NC |
| 398 | 841 | CCCAAAGAATCTATACTTAT | 2 | 2 | NC | NC |
| 399 | 842 | CCCCAAAGAATCTATACTTA | 1 | 2 | NC | NC |
| 400 | 843 | TCCCCAAAGAATCTATACTT | 1 | 2 | NC | NC |
| 401 | 844 | TTCCCCAAAGAATCTATACT | 1 | 2 | NC | NC |
| 402 | 845 | CTTCCCCAAAGAATCTATAC | 2 | 2 | NC | NC |
| 403 | 854 | TCTCTGCATCTTCCCCAAAG | 1 | 1 | NC | NC |
| 404 | 855 | ATCTCTGCATCTTCCCCAAA | 1 | 1 | NC | NC |
| 405 | 856 | AATCTCTGCATCTTCCCCAA | 1 | 1 | NC | NC |
| 406 | 857 | CAATCTCTGCATCTTCCCCA | 2 | 2 | NC | NC |
| 407 | 879 | TAAATATTGAGCTCTCGGGC | 2 | 2 | NC | NC |
| 408 | 880 | ATAAATATTGAGCTCTCGGG | 2 | 2 | NC | NC |
| 409 | 881 | AATAAATATTGAGCTCTCGG | 2 | 2 | NC | NC |
| 410 | 893 | GATCTAAATGGCAATAAATA | 2 | 2 | NC | NC |
| 411 | 894 | TGATCTAAATGGCAATAAAT | 1 | 1 | NC | NC |
| 412 | 895 | GTGATCTAAATGGCAATAAA | 2 | 2 | NC | NC |
| 413 | 896 | TGTGATCTAAATGGCAATAA | 2 | 2 | NC | NC |
| 414 | 897 | TTGTGATCTAAATGGCAATA | 2 | 2 | NC | NC |
| 415 | 898 | GTTGTGATCTAAATGGCAAT | 2 | 2 | NC | NC |
| 416 | 899 | AGTTGTGATCTAAATGGCAA | 2 | 2 | NC | NC |
| 417 | 900 | AAGTTGTGATCTAAATGGCA | 2 | 2 | NC | NC |
| 418 | 901 | AAAGTTGTGATCTAAATGGC | 2 | 2 | NC | NC |
| 419 | 902 | TAAAGTTGTGATCTAAATGG | 2 | 2 | NC | NC |
| 420 | 903 | ATAAAGTTGTGATCTAAATG | 1 | 1 | NC | NC |
| 421 | 904 | CATAAAGTTGTGATCTAAAT | 2 | 2 | NC | NC |
| 422 | 905 | TCATAAAGTTGTGATCTAAA | 2 | 2 | NC | NC |
| 423 | 906 | GTCATAAAGTTGTGATCTAA | 2 | 2 | NC | NC |
| 424 | 907 | TGTCATAAAGTTGTGATCTA | 2 | 2 | NC | NC |
| 425 | 908 | CTGTCATAAAGTTGTGATCT | 1 | 1 | NC | NC |
| 426 | 909 | GCTGTCATAAAGTTGTGATC | 2 | 2 | NC | NC |
| 427 | 910 | TGCTGTCATAAAGTTGTGAT | 2 | 2 | NC | NC |
| 428 | 911 | TTGCTGTCATAAAGTTGTGA | 2 | 2 | NC | NC |
| 429 | 912 | CTTGCTGTCATAAAGTTGTG | 2 | 2 | NC | NC |
| 430 | 913 | ACTTGCTGTCATAAAGTTGT | 2 | 1 | NC | NC |
| 431 | 914 | TACTTGCTGTCATAAAGTTG | 2 | 2 | NC | NC |
| 432 | 915 | ATACTTGCTGTCATAAAGTT | 2 | 2 | NC | NC |
| 433 | 917 | GTATACTTGCTGTCATAAAG | 1 | 3 | NC | NC |
| 434 | 918 | GGTATACTTGCTGTCATAAA | 2 | 2 | NC | NC |
| 435 | 919 | AGGTATACTTGCTGTCATAA | 2 | 2 | NC | NC |
| 436 | 920 | TAGGTATACTTGCTGTCATA | 2 | 2 | NC | NC |
| 437 | 921 | GTAGGTATACTTGCTGTCAT | 2 | 2 | NC | NC |
| 438 | 922 | AGTAGGTATACTTGCTGTCA | 2 | 2 | NC | NC |
| 439 | 931 | CAGTCTGTGAGTAGGTATAC | 3 | 2 | NC | NC |
| 440 | 932 | ACAGTCTGTGAGTAGGTATA | 2 | 2 | NC | NC |
| 441 | 933 | AACAGTCTGTGAGTAGGTAT | 2 | 3 | NC | NC |
| 442 | 934 | AAACAGTCTGTGAGTAGGTA | 2 | 2 | NC | NC |
| 443 | 935 | CAAACAGTCTGTGAGTAGGT | 1 | 2 | NC | NC |
| 444 | 936 | ACAAACAGTCTGTGAGTAGG | 2 | 2 | NC | NC |
| 445 | 937 | AACAAACAGTCTGTGAGTAG | 1 | 2 | NC | NC |
| 446 | 938 | GAACAAACAGTCTGTGAGTA | 2 | 2 | NC | NC |
| 447 | 939 | TGAACAAACAGTCTGTGAGT | 2 | 2 | NC | NC |
| 448 | 940 | ATGAACAAACAGTCTGTGAG | 2 | 2 | NC | NC |
| 449 | 941 | CATGAACAAACAGTCTGTGA | 2 | 2 | NC | NC |
| 450 | 942 | ACATGAACAAACAGTCTGTG | 2 | 2 | NC | NC |
| 451 | 943 | TACATGAACAAACAGTCTGT | 2 | 2 | NC | NC |
| 452 | 944 | GTACATGAACAAACAGTCTG | 2 | 2 | NC | NC |
| 453 | 945 | CGTACATGAACAAACAGTCT | 3 | 3 | NC | NC |
| 454 | 946 | GCGTACATGAACAAACAGTC | 2 | 3 | NC | NC |
| 455 | 947 | GGCGTACATGAACAAACAGT | 3 | 3 | NC | NC |
| 456 | 948 | CGGCGTACATGAACAAACAG | 2 | 3 | NC | NC |
| 457 | 949 | GCGGCGTACATGAACAAACA | 3 | 3 | NC | NC |
| 458 | 950 | GGCGGCGTACATGAACAAAC | 3 | 3 | NC | NC |
| 459 | 951 | AGGCGGCGTACATGAACAAA | 3 | 3 | NC | NC |
| 460 | 952 | CAGGCGGCGTACATGAACAA | 3 | 3 | NC | NC |
| 461 | 969 | TTATATCCTTTTGCCACCAG | 2 | 2 | NC | NC |
| 462 | 970 | CTTATATCCTTTTGCCACCA | 2 | 2 | NC | NC |
| 463 | 971 | CCTTATATCCTTTTGCCACC | 2 | 2 | NC | NC |
| 464 | 972 | ACCTTATATCCTTTTGCCAC | 2 | 3 | NC | NC |
| 465 | 973 | CACCTTATATCCTTTTGCCA | 2 | 2 | NC | NC |
| 466 | 974 | CCACCTTATATCCTTTTGCC | 2 | 2 | NC | NC |
| 467 | 975 | CCCACCTTATATCCTTTTGC | 2 | 2 | NC | NC |
| 468 | 976 | TCCCACCTTATATCCTTTTG | 2 | 2 | NC | NC |
| 469 | 977 | CTCCCACCTTATATCCTTTT | 1 | 2 | NC | NC |
| 470 | 978 | ACTCCCACCTTATATCCTTT | 2 | 2 | NC | NC |
| 471 | 979 | AACTCCCACCTTATATCCTT | 2 | 2 | NC | NC |
| 472 | 980 | CAACTCCCACCTTATATCCT | 2 | 2 | NC | NC |
| 473 | 981 | ACAACTCCCACCTTATATCC | 2 | 2 | NC | NC |
| 474 | 982 | CACAACTCCCACCTTATATC | 3 | 2 | NC | NC |
| 475 | 983 | TCACAACTCCCACCTTATAT | 2 | 2 | NC | NC |
| 476 | 984 | TTCACAACTCCCACCTTATA | 2 | 2 | NC | NC |
| 477 | 985 | CTTCACAACTCCCACCTTAT | 2 | 2 | NC | NC |
| 478 | 986 | GCTTCACAACTCCCACCTTA | 2 | 2 | NC | NC |
| 479 | 987 | TGCTTCACAACTCCCACCTT | 2 | 2 | 2 | 2 |
| 480 | 988 | TTGCTTCACAACTCCCACCT | 2 | 2 | 2 | 2 |
| 481 | 989 | TTTGCTTCACAACTCCCACC | 2 | 2 | 2 | 2 |
| 482 | 990 | GTTTGCTTCACAACTCCCAC | 2 | 2 | 2 | 2 |
| 483 | 991 | AGTTTGCTTCACAACTCCCA | 2 | 2 | 2 | 2 |
| 484 | 992 | CAGTTTGCTTCACAACTCCC | 2 | 3 | 1 | 2 |
| 485 | 993 | TCAGTTTGCTTCACAACTCC | 2 | 2 | 1 | 2 |
| 486 | 994 | TTCAGTTTGCTTCACAACTC | 1 | 1 | 1 | 2 |
| 487 | 995 | TTTCAGTTTGCTTCACAACT | 2 | 2 | 2 | 2 |
| 488 | 996 | GTTTCAGTTTGCTTCACAAC | 2 | 2 | 2 | 2 |
| 489 | 997 | AGTTTCAGTTTGCTTCACAA | 2 | 2 | 1 | 2 |
| 490 | 998 | CAGTTTCAGTTTGCTTCACA | 2 | 2 | 1 | 1 |
| 491 | 999 | GCAGTTTCAGTTTGCTTCAC | 2 | 2 | 1 | 2 |
| 492 | 1004 | ATGCTGCAGTTTCAGTTTGC | 2 | 2 | NC | NC |
| 493 | 1005 | AATGCTGCAGTTTCAGTTTG | 2 | 2 | NC | NC |
| 494 | 1006 | TAATGCTGCAGTTTCAGTTT | 1 | 2 | NC | NC |
| 495 | 1007 | TTAATGCTGCAGTTTCAGTT | 1 | 1 | NC | NC |
| 496 | 1008 | TTTAATGCTGCAGTTTCAGT | 1 | 2 | NC | NC |
| 497 | 1010 | CCTTTAATGCTGCAGTTTCA | 2 | 2 | NC | NC |
| 498 | 1011 | GCCTTTAATGCTGCAGTTTC | 3 | 2 | NC | NC |
| 499 | 1012 | GGCCTTTAATGCTGCAGTTT | 3 | 2 | NC | NC |
| 500 | 1013 | TGGCCTTTAATGCTGCAGTT | 2 | 2 | NC | NC |
| 501 | 1014 | ATGGCCTTTAATGCTGCAGT | 2 | 2 | NC | NC |
| 502 | 1015 | AATGGCCTTTAATGCTGCAG | 2 | 2 | NC | NC |
| 503 | 1016 | CAATGGCCTTTAATGCTGCA | 2 | 2 | NC | NC |
| 504 | 1017 | CCAATGGCCTTTAATGCTGC | 2 | 3 | NC | NC |
| 505 | 1018 | TCCAATGGCCTTTAATGCTG | 2 | 2 | NC | NC |
| 506 | 1019 | CTCCAATGGCCTTTAATGCT | 3 | 2 | NC | NC |
| 507 | 1020 | TCTCCAATGGCCTTTAATGC | 2 | 2 | NC | NC |
| 508 | 1021 | GTCTCCAATGGCCTTTAATG | 2 | 3 | NC | NC |
| 509 | 1022 | TGTCTCCAATGGCCTTTAAT | 2 | 2 | NC | NC |
| 510 | 1023 | TTGTCTCCAATGGCCTTTAA | 2 | 2 | NC | NC |
| 511 | 1024 | GTTGTCTCCAATGGCCTTTA | 2 | 2 | NC | NC |
| 512 | 1025 | TGTTGTCTCCAATGGCCTTT | 2 | 2 | NC | NC |
| 513 | 1026 | CTGTTGTCTCCAATGGCCTT | 2 | 2 | NC | NC |
| 514 | 1027 | TCTGTTGTCTCCAATGGCCT | 2 | 2 | NC | NC |
| 515 | 1028 | TTCTGTTGTCTCCAATGGCC | 1 | 2 | NC | NC |
| 516 | 1029 | CTTCTGTTGTCTCCAATGGC | 1 | 2 | NC | NC |
| 517 | 1030 | ACTTCTGTTGTCTCCAATGG | 1 | 2 | NC | NC |
| 518 | 1031 | AACTTCTGTTGTCTCCAATG | 1 | 2 | NC | NC |
| 519 | 1032 | GAACTTCTGTTGTCTCCAAT | 2 | 2 | NC | NC |
| 520 | 1033 | TGAACTTCTGTTGTCTCCAA | 2 | 2 | NC | NC |
| 521 | 1034 | GTGAACTTCTGTTGTCTCCA | 2 | 2 | NC | NC |
| 522 | 1035 | AGTGAACTTCTGTTGTCTCC | 2 | 2 | NC | NC |
| 523 | 1036 | GAGTGAACTTCTGTTGTCTC | 3 | 2 | NC | NC |
| 524 | 1037 | AGAGTGAACTTCTGTTGTCT | 2 | 1 | NC | NC |
| 525 | 1038 | AAGAGTGAACTTCTGTTGTC | 2 | 2 | NC | NC |
| 526 | 1039 | AAAGAGTGAACTTCTGTTGT | 2 | 1 | NC | NC |
| 527 | 1040 | AAAAGAGTGAACTTCTGTTG | 2 | 2 | NC | NC |
| 528 | 1042 | GGAAAAGAGTGAACTTCTGT | 2 | 2 | NC | NC |
| 529 | 1043 | GGGAAAAGAGTGAACTTCTG | 2 | 2 | NC | NC |
| 530 | 1044 | CGGGAAAAGAGTGAACTTCT | 2 | 2 | NC | NC |
| 531 | 1045 | CCGGGAAAAGAGTGAACTTC | 2 | 2 | NC | NC |
| 532 | 1046 | TCCGGGAAAAGAGTGAACTT | 2 | 2 | NC | NC |
| 533 | 1047 | TTCCGGGAAAAGAGTGAACT | 2 | 2 | NC | NC |
| 534 | 1048 | TTTCCGGGAAAAGAGTGAAC | 2 | 3 | NC | NC |
| 535 | 1049 | ATTTCCGGGAAAAGAGTGAA | 2 | 3 | NC | NC |
| 536 | 1050 | AATTTCCGGGAAAAGAGTGA | 2 | 3 | NC | NC |
| 537 | 1051 | CAATTTCCGGGAAAAGAGTG | 2 | 3 | NC | NC |
| 538 | 1052 | TCAATTTCCGGGAAAAGAGT | 2 | 2 | NC | NC |
| 539 | 1053 | GTCAATTTCCGGGAAAAGAG | 2 | 2 | NC | NC |
| 540 | 1054 | AGTCAATTTCCGGGAAAAGA | 2 | 2 | NC | NC |
| 541 | 1055 | CAGTCAATTTCCGGGAAAAG | 2 | 2 | NC | NC |
| 542 | 1056 | GCAGTCAATTTCCGGGAAAA | 1 | 2 | NC | NC |
| 543 | 1057 | GGCAGTCAATTTCCGGGAAA | 2 | 3 | NC | NC |
| 544 | 1058 | GGGCAGTCAATTTCCGGGAA | 2 | 3 | NC | NC |
| 545 | 1059 | AGGGCAGTCAATTTCCGGGA | 2 | 2 | NC | NC |
| 546 | 1060 | AAGGGCAGTCAATTTCCGGG | 2 | 2 | NC | NC |
| 547 | 1061 | AAAGGGCAGTCAATTTCCGG | 2 | 2 | NC | NC |
| 548 | 1062 | TAAAGGGCAGTCAATTTCCG | 2 | 3 | NC | NC |
| 549 | 1063 | ATAAAGGGCAGTCAATTTCC | 2 | 2 | NC | NC |
| 550 | 1064 | TATAAAGGGCAGTCAATTTC | 2 | 2 | NC | NC |
| 551 | 1065 | GTATAAAGGGCAGTCAATTT | 2 | 2 | NC | NC |
| 552 | 1066 | TGTATAAAGGGCAGTCAATT | 2 | 2 | NC | NC |
| 553 | 1067 | TTGTATAAAGGGCAGTCAAT | 2 | 2 | NC | NC |
| 554 | 1068 | TTTGTATAAAGGGCAGTCAA | 2 | 2 | NC | NC |
| 555 | 1069 | TTTTGTATAAAGGGCAGTCA | 2 | 2 | NC | NC |
| 556 | 1070 | ATTTTGTATAAAGGGCAGTC | 2 | 2 | NC | NC |
| 557 | 1071 | GATTTTGTATAAAGGGCAGT | 2 | 2 | NC | NC |
| 558 | 1072 | AGATTTTGTATAAAGGGCAG | 2 | 2 | NC | NC |
| 559 | 1073 | TAGATTTTGTATAAAGGGCA | 2 | 2 | NC | NC |
| 560 | 1074 | GTAGATTTTGTATAAAGGGC | 2 | 2 | NC | NC |
| 561 | 1075 | TGTAGATTTTGTATAAAGGG | 2 | 2 | NC | NC |
| 562 | 1076 | GTGTAGATTTTGTATAAAGG | 2 | 2 | NC | NC |
| 563 | 1077 | AGTGTAGATTTTGTATAAAG | 2 | 2 | NC | NC |
| 564 | 1082 | CAATAAGTGTAGATTTTGTA | 1 | NC | NC | NC |
| 565 | 1083 | CCAATAAGTGTAGATTTTGT | 2 | NC | NC | NC |
| 566 | 1084 | TCCAATAAGTGTAGATTTTG | 2 | NC | NC | NC |
| 567 | 1085 | CTCCAATAAGTGTAGATTTT | 1 | NC | NC | NC |
| 568 | 1086 | TCTCCAATAAGTGTAGATTT | 1 | NC | NC | NC |
| 569 | 1087 | TTCTCCAATAAGTGTAGATT | 2 | NC | NC | NC |
| 570 | 1088 | CTTCTCCAATAAGTGTAGAT | 1 | NC | NC | NC |
| 571 | 1089 | TCTTCTCCAATAAGTGTAGA | 1 | NC | NC | NC |
| 572 | 1090 | ATCTTCTCCAATAAGTGTAG | 3 | NC | NC | NC |
| 573 | 1091 | CATCTTCTCCAATAAGTGTA | 2 | NC | NC | NC |
| 574 | 1092 | ACATCTTCTCCAATAAGTGT | 2 | NC | NC | NC |
| 575 | 1093 | CACATCTTCTCCAATAAGTG | 2 | NC | NC | NC |
| 576 | 1094 | TCACATCTTCTCCAATAAGT | 1 | NC | NC | NC |
| 577 | 1095 | TTCACATCTTCTCCAATAAG | 2 | NC | NC | NC |
| 578 | 1096 | ATTCACATCTTCTCCAATAA | 2 | NC | NC | NC |
| 579 | 1097 | GATTCACATCTTCTCCAATA | 1 | NC | NC | NC |
| 580 | 1098 | GGATTCACATCTTCTCCAAT | 2 | 1 | NC | NC |
| 581 | 1099 | GGGATTCACATCTTCTCCAA | 2 | 1 | NC | NC |
| 582 | 1117 | ATCATCCAGCTTGATTAGGG | 3 | 3 | NC | NC |
| 583 | 1118 | CATCATCCAGCTTGATTAGG | 2 | 2 | NC | NC |
| 584 | 1119 | GCATCATCCAGCTTGATTAG | 2 | 3 | NC | NC |
| 585 | 1120 | AGCATCATCCAGCTTGATTA | 2 | 2 | NC | NC |
| 586 | 1127 | CATTTACAGCATCATCCAGC | 2 | 2 | NC | NC |
| 587 | 1128 | ACATTTACAGCATCATCCAG | 1 | 2 | NC | NC |
| 588 | 1129 | AACATTTACAGCATCATCCA | 2 | 2 | NC | NC |
| 589 | 1130 | CAACATTTACAGCATCATCC | 2 | 2 | NC | NC |
| 590 | 1131 | TCAACATTTACAGCATCATC | 2 | 2 | NC | NC |
| 591 | 1132 | ATCAACATTTACAGCATCAT | 2 | 2 | NC | NC |
| 592 | 1133 | CATCAACATTTACAGCATCA | 2 | 1 | NC | NC |
| 593 | 1134 | TCATCAACATTTACAGCATC | 1 | 1 | NC | NC |
| 594 | 1135 | CTCATCAACATTTACAGCAT | 1 | 1 | NC | NC |
| 595 | 1136 | TCTCATCAACATTTACAGCA | 1 | 2 | NC | NC |
| 596 | 1137 | ATCTCATCAACATTTACAGC | 2 | 1 | NC | NC |
| 597 | 1138 | TATCTCATCAACATTTACAG | 1 | 1 | NC | NC |
| 598 | 1139 | TTATCTCATCAACATTTACA | 2 | 2 | NC | NC |
| 599 | 1140 | ATTATCTCATCAACATTTAC | 1 | 2 | NC | NC |
| 600 | 1141 | CATTATCTCATCAACATTTA | 2 | 1 | NC | NC |
| 601 | 1142 | TCATTATCTCATCAACATTT | 1 | 1 | NC | NC |
| 602 | 1143 | GTCATTATCTCATCAACATT | 1 | 2 | NC | NC |
| 603 | 1144 | AGTCATTATCTCATCAACAT | 2 | 2 | NC | NC |
| 604 | 1145 | CAGTCATTATCTCATCAACA | 2 | 2 | NC | NC |
| 605 | 1146 | TCAGTCATTATCTCATCAAC | 1 | 2 | NC | NC |
| 606 | 1147 | ATCAGTCATTATCTCATCAA | 1 | 2 | NC | NC |
| 607 | 1148 | TATCAGTCATTATCTCATCA | 1 | 2 | NC | NC |
| 608 | 1149 | GTATCAGTCATTATCTCATC | 1 | 2 | NC | NC |
| 609 | 1150 | AGTATCAGTCATTATCTCAT | 1 | 2 | NC | NC |
| 610 | 1151 | AAGTATCAGTCATTATCTCA | 1 | 2 | NC | NC |
| 611 | 1152 | GAAGTATCAGTCATTATCTC | 2 | 2 | NC | NC |
| 612 | 1153 | AGAAGTATCAGTCATTATCT | 1 | 2 | NC | NC |
| 613 | 1154 | TAGAAGTATCAGTCATTATC | 2 | 2 | NC | NC |
| 614 | 1155 | GTAGAAGTATCAGTCATTAT | 2 | 2 | NC | NC |
| 615 | 1156 | GGTAGAAGTATCAGTCATTA | 2 | 3 | NC | NC |
| 616 | 1157 | TGGTAGAAGTATCAGTCATT | 2 | 2 | NC | NC |
| 617 | 1158 | CTGGTAGAAGTATCAGTCAT | 1 | 1 | NC | NC |
| 618 | 1159 | GCTGGTAGAAGTATCAGTCA | 1 | 1 | NC | NC |
| 619 | 1160 | AGCTGGTAGAAGTATCAGTC | 2 | 2 | NC | NC |
| 620 | 1161 | TAGCTGGTAGAAGTATCAGT | 2 | 2 | NC | NC |
| 621 | 1163 | GATAGCTGGTAGAAGTATCA | 2 | 2 | NC | NC |
| 622 | 1164 | AGATAGCTGGTAGAAGTATC | 2 | 2 | NC | NC |
| 623 | 1165 | AAGATAGCTGGTAGAAGTAT | 2 | 2 | NC | NC |
| 624 | 1166 | GAAGATAGCTGGTAGAAGTA | 2 | 2 | NC | NC |
| 625 | 1167 | AGAAGATAGCTGGTAGAAGT | 2 | 2 | NC | NC |
| 626 | 1168 | CAGAAGATAGCTGGTAGAAG | 2 | 2 | NC | NC |
| 627 | 1169 | ACAGAAGATAGCTGGTAGAA | 2 | 2 | NC | NC |
| 628 | 1170 | CACAGAAGATAGCTGGTAGA | 2 | 2 | NC | NC |
| 629 | 1171 | GCACAGAAGATAGCTGGTAG | 2 | 3 | NC | NC |
| 630 | 1172 | TGCACAGAAGATAGCTGGTA | 2 | 3 | NC | NC |
| 631 | 1173 | ATGCACAGAAGATAGCTGGT | 2 | 3 | NC | NC |
| 632 | 1174 | GATGCACAGAAGATAGCTGG | 2 | 2 | NC | NC |
| 633 | 1176 | GAGATGCACAGAAGATAGCT | 2 | 2 | NC | NC |
| 634 | 1177 | AGAGATGCACAGAAGATAGC | 2 | 2 | NC | NC |
| 635 | 1178 | CAGAGATGCACAGAAGATAG | 2 | 1 | NC | NC |
| 636 | 1179 | TCAGAGATGCACAGAAGATA | 2 | 2 | NC | NC |
| 637 | 1180 | TTCAGAGATGCACAGAAGAT | 2 | 2 | NC | NC |
| 638 | 1181 | TTTCAGAGATGCACAGAAGA | 1 | 1 | NC | NC |
| 639 | 1182 | TTTTCAGAGATGCACAGAAG | 2 | 1 | NC | NC |
| 640 | 1183 | ATTTTCAGAGATGCACAGAA | 1 | 1 | NC | NC |
| 641 | 1184 | TATTTTCAGAGATGCACAGA | 1 | 1 | NC | NC |
| 642 | 1185 | TTATTTTCAGAGATGCACAG | 1 | 1 | NC | NC |
| 643 | 1186 | CTTATTTTCAGAGATGCACA | 2 | 2 | NC | NC |
| 644 | 1187 | CCTTATTTTCAGAGATGCAC | 2 | 2 | NC | NC |
| 645 | 1188 | TCCTTATTTTCAGAGATGCA | 2 | 1 | NC | NC |
| 646 | 1189 | TTCCTTATTTTCAGAGATGC | 1 | 1 | NC | NC |
| 647 | 1190 | TTTCCTTATTTTCAGAGATG | 1 | 1 | NC | NC |
| 648 | 1191 | TTTTCCTTATTTTCAGAGAT | 1 | 1 | NC | NC |
| 649 | 1192 | ATTTTCCTTATTTTCAGAGA | 1 | 2 | NC | NC |
| 650 | 1193 | CATTTTCCTTATTTTCAGAG | 1 | 1 | NC | NC |
| 651 | 1194 | ACATTTTCCTTATTTTCAGA | 1 | 2 | NC | NC |
| 652 | 1195 | AACATTTTCCTTATTTTCAG | 1 | 2 | NC | NC |
| 653 | 1197 | CTAACATTTTCCTTATTTTC | 1 | 1 | NC | NC |
| 654 | 1198 | CCTAACATTTTCCTTATTTT | 1 | 1 | NC | NC |
| 655 | 1199 | CCCTAACATTTTCCTTATTT | 1 | 1 | NC | NC |
| 656 | 1200 | TCCCTAACATTTTCCTTATT | 1 | 2 | NC | NC |
| 657 | 1201 | GTCCCTAACATTTTCCTTAT | 2 | 1 | NC | NC |
| 658 | 1202 | TGTCCCTAACATTTTCCTTA | 2 | 1 | NC | NC |
| 659 | 1203 | TTGTCCCTAACATTTTCCTT | 2 | 2 | NC | NC |
| 660 | 1204 | TTTGTCCCTAACATTTTCCT | 1 | 2 | NC | NC |
| 661 | 1205 | TTTTGTCCCTAACATTTTCC | 2 | 2 | NC | NC |
| 662 | 1206 | TTTTTGTCCCTAACATTTTC | 1 | 1 | NC | NC |
| 663 | 1224 | ATAAAAATGTTGCCCTTTTT | 1 | NC | NC | NC |
| 664 | 1225 | AATAAAAATGTTGCCCTTTT | 2 | NC | NC | NC |
| 665 | 1226 | CAATAAAAATGTTGCCCTTT | 2 | NC | NC | NC |
| 666 | 1227 | CCAATAAAAATGTTGCCCTT | 2 | NC | NC | NC |
| 667 | 1228 | GCCAATAAAAATGTTGCCCT | 2 | NC | NC | NC |
| 668 | 1229 | TGCCAATAAAAATGTTGCCC | 1 | NC | NC | NC |
| 669 | 1230 | ATGCCAATAAAAATGTTGCC | 2 | NC | NC | NC |
| 670 | 1231 | AATGCCAATAAAAATGTTGC | 1 | NC | NC | NC |
| 671 | 1232 | CAATGCCAATAAAAATGTTG | 1 | NC | NC | NC |
| 672 | 1233 | ACAATGCCAATAAAAATGTT | 2 | NC | NC | NC |
| 673 | 1234 | CACAATGCCAATAAAAATGT | 1 | NC | NC | NC |
| 674 | 1235 | CCACAATGCCAATAAAAATG | 2 | NC | NC | NC |
| 675 | 1236 | CCCACAATGCCAATAAAAAT | 2 | NC | NC | NC |
| 676 | 1237 | TCCCACAATGCCAATAAAAA | 2 | 1 | NC | NC |
| 677 | 1238 | CTCCCACAATGCCAATAAAA | 2 | 2 | NC | NC |
| 678 | 1239 | ACTCCCACAATGCCAATAAA | 2 | 1 | NC | NC |
| 679 | 1240 | CACTCCCACAATGCCAATAA | 2 | 1 | NC | NC |
| 680 | 1241 | GCACTCCCACAATGCCAATA | 2 | 2 | NC | NC |
| 681 | 1269 | TCAAACACAACCTCGCCTGT | 2 | 3 | NC | NC |
| 682 | 1270 | ATCAAACACAACCTCGCCTG | 2 | 2 | NC | NC |
| 683 | 1271 | TATCAAACACAACCTCGCCT | 2 | 2 | NC | NC |
| 684 | 1272 | CTATCAAACACAACCTCGCC | 2 | 2 | NC | NC |
| 685 | 1273 | ACTATCAAACACAACCTCGC | 3 | 3 | NC | NC |
| 686 | 1274 | AACTATCAAACACAACCTCG | 2 | 2 | NC | NC |
| 687 | 1275 | AAACTATCAAACACAACCTC | 1 | 1 | NC | NC |
| 688 | 1276 | GAAACTATCAAACACAACCT | 2 | 2 | NC | NC |
| 689 | 1277 | GGAAACTATCAAACACAACC | 2 | 2 | NC | NC |
| 690 | 1278 | TGGAAACTATCAAACACAAC | 2 | 2 | NC | NC |
| 691 | 1279 | CTGGAAACTATCAAACACAA | 2 | 2 | NC | NC |
| 692 | 1280 | CCTGGAAACTATCAAACACA | 2 | 1 | NC | NC |
| 693 | 1281 | TCCTGGAAACTATCAAACAC | 1 | 1 | NC | NC |
| 694 | 1282 | GTCCTGGAAACTATCAAACA | 1 | 1 | NC | NC |
| 695 | 1283 | AGTCCTGGAAACTATCAAAC | 2 | 2 | NC | NC |
| 696 | 1284 | GAGTCCTGGAAACTATCAAA | 1 | 1 | NC | NC |
| 697 | 1285 | AGAGTCCTGGAAACTATCAA | 2 | 2 | NC | NC |
| 698 | 1286 | CAGAGTCCTGGAAACTATCA | 2 | 2 | NC | NC |
| 699 | 1297 | TGAACGAGAAGCAGAGTCCT | 2 | 2 | NC | NC |
| 700 | 1298 | CTGAACGAGAAGCAGAGTCC | 2 | 2 | NC | NC |
| 701 | 1299 | TCTGAACGAGAAGCAGAGTC | 2 | 2 | NC | NC |
| 702 | 1310 | GGGTTTCTAGCTCTGAACGA | 3 | 3 | NC | NC |
| 703 | 1311 | CGGGTTTCTAGCTCTGAACG | 3 | 3 | NC | NC |
| 704 | 1312 | CCGGGTTTCTAGCTCTGAAC | 3 | 2 | NC | NC |
| 705 | 1313 | TCCGGGTTTCTAGCTCTGAA | 2 | 2 | NC | NC |
| 706 | 1314 | ATCCGGGTTTCTAGCTCTGA | 2 | 2 | NC | NC |
| 707 | 1315 | CATCCGGGTTTCTAGCTCTG | 2 | 2 | NC | NC |
| 708 | 1316 | ACATCCGGGTTTCTAGCTCT | 3 | 2 | NC | NC |
| 709 | 1317 | GACATCCGGGTTTCTAGCTC | 2 | 3 | NC | NC |
| 710 | 1318 | TGACATCCGGGTTTCTAGCT | 2 | 2 | NC | NC |
| 711 | 1319 | TTGACATCCGGGTTTCTAGC | 3 | 3 | NC | NC |
| 712 | 1320 | CTTGACATCCGGGTTTCTAG | 2 | NC | NC | NC |
| 713 | 1321 | GCTTGACATCCGGGTTTCTA | 3 | NC | NC | NC |
| 714 | 1322 | GGCTTGACATCCGGGTTTCT | 3 | NC | NC | NC |
| 715 | 1323 | AGGCTTGACATCCGGGTTTC | 2 | NC | NC | NC |
| 716 | 1324 | CAGGCTTGACATCCGGGTTT | 2 | NC | NC | NC |
| 717 | 1371 | TCTGTTTGCTCGGACAAGGC | 2 | 2 | NC | NC |
| 718 | 1372 | CTCTGTTTGCTCGGACAAGG | 2 | 2 | NC | NC |
| 719 | 1373 | CCTCTGTTTGCTCGGACAAG | 2 | NC | NC | NC |
| 720 | 1374 | GCCTCTGTTTGCTCGGACAA | 2 | NC | NC | NC |
| 721 | 1383 | TGGATGAGCGCCTCTGTTTG | 2 | NC | NC | NC |
| 722 | 1384 | GTGGATGAGCGCCTCTGTTT | 3 | NC | NC | NC |
| 723 | 1385 | TGTGGATGAGCGCCTCTGTT | 2 | NC | NC | NC |
| 724 | 1395 | GATGTGGCTCTGTGGATGAG | 2 | 2 | NC | NC |
| 725 | 1396 | AGATGTGGCTCTGTGGATGA | 2 | 2 | NC | NC |
| 726 | 1397 | CAGATGTGGCTCTGTGGATG | 2 | 2 | NC | NC |
| 727 | 1410 | TCCTGCACACTAACAGATGT | 2 | 2 | NC | NC |
| 728 | 1411 | ATCCTGCACACTAACAGATG | 2 | 2 | NC | NC |
| 729 | 1412 | CATCCTGCACACTAACAGAT | 2 | 2 | NC | NC |
| 730 | 1413 | TCATCCTGCACACTAACAGA | 2 | 2 | NC | NC |
| 731 | 1414 | GTCATCCTGCACACTAACAG | 2 | 2 | NC | NC |
| 732 | 1415 | TGTCATCCTGCACACTAACA | 2 | 2 | NC | NC |
| 733 | 1416 | CTGTCATCCTGCACACTAAC | 2 | 2 | NC | NC |
| 734 | 1417 | TCTGTCATCCTGCACACTAA | 2 | 2 | NC | NC |
| 735 | 1418 | TTCTGTCATCCTGCACACTA | 2 | 2 | NC | NC |
| 736 | 1419 | ATTCTGTCATCCTGCACACT | 2 | 2 | NC | NC |
| 737 | 1420 | AATTCTGTCATCCTGCACAC | 2 | 2 | NC | NC |
| 738 | 1421 | GAATTCTGTCATCCTGCACA | 2 | 2 | NC | NC |
| 739 | 1422 | CGAATTCTGTCATCCTGCAC | 2 | 2 | NC | NC |
| 740 | 1423 | TCGAATTCTGTCATCCTGCA | 2 | 2 | NC | NC |
| 741 | 1424 | CTCGAATTCTGTCATCCTGC | 2 | 2 | NC | NC |
| 742 | 1425 | ACTCGAATTCTGTCATCCTG | 2 | 2 | NC | NC |
| 743 | 1426 | GACTCGAATTCTGTCATCCT | 2 | NC | NC | NC |
| 744 | 1427 | CGACTCGAATTCTGTCATCC | 3 | NC | NC | NC |
| 745 | 1428 | TCGACTCGAATTCTGTCATC | 3 | NC | NC | NC |
| 746 | 1439 | TATCCATCCTTTCGACTCGA | 3 | NC | NC | NC |
| 747 | 1440 | TTATCCATCCTTTCGACTCG | 3 | NC | NC | NC |
| 748 | 1441 | GTTATCCATCCTTTCGACTC | 2 | NC | NC | NC |
| 749 | 1442 | TGTTATCCATCCTTTCGACT | 2 | NC | NC | NC |
| 750 | 1443 | ATGTTATCCATCCTTTCGAC | 3 | NC | NC | NC |
| 751 | 1444 | AATGTTATCCATCCTTTCGA | 2 | NC | NC | NC |
| 752 | 1445 | AAATGTTATCCATCCTTTCG | 2 | NC | NC | NC |
| 753 | 1446 | TAAATGTTATCCATCCTTTC | 1 | 1 | NC | NC |
| 754 | 1447 | ATAAATGTTATCCATCCTTT | 1 | 2 | NC | NC |
| 755 | 1448 | AATAAATGTTATCCATCCTT | 1 | 2 | NC | NC |
| 756 | 1449 | AAATAAATGTTATCCATCCT | 2 | 1 | NC | NC |
| 757 | 1450 | AAAATAAATGTTATCCATCC | 1 | 2 | NC | NC |
| 758 | 1451 | CAAAATAAATGTTATCCATC | 1 | 2 | NC | NC |
| 759 | 1459 | GCTGTATTCAAAATAAATGT | 1 | 1 | NC | NC |
| 760 | 1460 | GGCTGTATTCAAAATAAATG | 2 | 1 | NC | NC |
| 761 | 1461 | TGGCTGTATTCAAAATAAAT | 2 | 2 | NC | NC |
| 762 | 1462 | ATGGCTGTATTCAAAATAAA | 2 | 2 | NC | NC |
| 763 | 1463 | CATGGCTGTATTCAAAATAA | 2 | 1 | NC | NC |
| 764 | 1464 | GCATGGCTGTATTCAAAATA | 1 | 1 | NC | NC |
| 765 | 1465 | AGCATGGCTGTATTCAAAAT | 2 | 2 | NC | NC |
| 766 | 1466 | AAGCATGGCTGTATTCAAAA | 1 | 1 | NC | NC |
| 767 | 1467 | AAAGCATGGCTGTATTCAAA | 1 | 2 | 2 | 2 |
| 768 | 1468 | GAAAGCATGGCTGTATTCAA | 2 | 2 | 2 | 2 |
| 769 | 1469 | GGAAAGCATGGCTGTATTCA | 2 | 2 | 2 | 2 |
| 770 | 1470 | TGGAAAGCATGGCTGTATTC | 2 | 2 | 2 | 2 |
| 771 | 1471 | CTGGAAAGCATGGCTGTATT | 1 | 2 | 2 | 2 |
| 772 | 1472 | CCTGGAAAGCATGGCTGTAT | 2 | 2 | NC | NC |
| 773 | 1473 | GCCTGGAAAGCATGGCTGTA | 2 | 2 | NC | NC |
| 774 | 1482 | TCTGTAACTGCCTGGAAAGC | 2 | 2 | NC | NC |
| 775 | 1483 | CTCTGTAACTGCCTGGAAAG | 2 | 2 | NC | NC |
| 776 | 1484 | ACTCTGTAACTGCCTGGAAA | 2 | 2 | NC | NC |
| 777 | 1485 | AACTCTGTAACTGCCTGGAA | 1 | 1 | NC | NC |
| 778 | 1486 | AAACTCTGTAACTGCCTGGA | 2 | 1 | NC | NC |
| 779 | 1487 | AAAACTCTGTAACTGCCTGG | 2 | 2 | NC | NC |
| 780 | 1488 | TAAAACTCTGTAACTGCCTG | 2 | 2 | NC | NC |
| 781 | 1489 | ATAAAACTCTGTAACTGCCT | 1 | 2 | NC | NC |
| 782 | 1490 | CATAAAACTCTGTAACTGCC | 1 | 2 | NC | NC |
| 783 | 1491 | GCATAAAACTCTGTAACTGC | 1 | 2 | NC | NC |
| 784 | 1492 | TGCATAAAACTCTGTAACTG | 1 | 1 | NC | NC |
| 785 | 1493 | TTGCATAAAACTCTGTAACT | 0 | 1 | NC | NC |
| 786 | 1494 | TTTGCATAAAACTCTGTAAC | 1 | 1 | NC | NC |
| 787 | 1495 | TTTTGCATAAAACTCTGTAA | 2 | 1 | NC | NC |
| 788 | 1496 | CTTTTGCATAAAACTCTGTA | 2 | 2 | NC | NC |
| 789 | 1497 | TCTTTTGCATAAAACTCTGT | 2 | 2 | NC | NC |
| 790 | 1498 | ATCTTTTGCATAAAACTCTG | 2 | NC | NC | NC |
| 791 | 1499 | TATCTTTTGCATAAAACTCT | 2 | NC | NC | NC |
| 792 | 1500 | GTATCTTTTGCATAAAACTC | 2 | NC | NC | NC |
| 793 | 1501 | TGTATCTTTTGCATAAAACT | 1 | NC | NC | NC |
| 794 | 1502 | CTGTATCTTTTGCATAAAAC | 2 | NC | NC | NC |
| 795 | 1503 | ACTGTATCTTTTGCATAAAA | 2 | NC | NC | NC |
| 796 | 1504 | AACTGTATCTTTTGCATAAA | 2 | NC | NC | NC |
| 797 | 1505 | CAACTGTATCTTTTGCATAA | 2 | NC | NC | NC |
| 798 | 1506 | TCAACTGTATCTTTTGCATA | 2 | NC | NC | NC |
| 799 | 1507 | GTCAACTGTATCTTTTGCAT | 2 | NC | NC | NC |
| 800 | 1508 | TGTCAACTGTATCTTTTGCA | 2 | NC | NC | NC |
| 801 | 1509 | ATGTCAACTGTATCTTTTGC | 2 | NC | NC | NC |
| 802 | 1510 | GATGTCAACTGTATCTTTTG | 2 | NC | NC | NC |
| 803 | 1511 | TGATGTCAACTGTATCTTTT | 1 | NC | NC | NC |
| 804 | 1512 | TTGATGTCAACTGTATCTTT | 2 | NC | NC | NC |
| 805 | 1513 | TTTGATGTCAACTGTATCTT | 2 | NC | NC | NC |
| 806 | 1514 | CTTTGATGTCAACTGTATCT | 2 | NC | NC | NC |
| 807 | 1515 | CCTTTGATGTCAACTGTATC | 2 | NC | NC | NC |
| 808 | 1516 | ACCTTTGATGTCAACTGTAT | 2 | NC | NC | NC |
| 809 | 1517 | AACCTTTGATGTCAACTGTA | 2 | NC | NC | NC |
| 810 | 1518 | GAACCTTTGATGTCAACTGT | 1 | 2 | NC | NC |
| 811 | 1519 | AGAACCTTTGATGTCAACTG | 1 | 2 | NC | NC |
| 812 | 1520 | GAGAACCTTTGATGTCAACT | 2 | 2 | NC | NC |
| 813 | 1521 | TGAGAACCTTTGATGTCAAC | 2 | 3 | NC | NC |
| 814 | 1522 | TTGAGAACCTTTGATGTCAA | 2 | 2 | NC | NC |
| 815 | 1523 | TTTGAGAACCTTTGATGTCA | 2 | 2 | NC | NC |
| 816 | 1524 | ATTTGAGAACCTTTGATGTC | 2 | 2 | NC | NC |
| 817 | 1525 | AATTTGAGAACCTTTGATGT | 2 | 2 | NC | NC |
| 818 | 1526 | TAATTTGAGAACCTTTGATG | 1 | 2 | NC | NC |
| 819 | 1527 | ATAATTTGAGAACCTTTGAT | 1 | 2 | NC | NC |
| 820 | 1528 | AATAATTTGAGAACCTTTGA | 2 | 1 | NC | NC |
| 821 | 1529 | AAATAATTTGAGAACCTTTG | 1 | 1 | NC | NC |
| 822 | 1530 | GAAATAATTTGAGAACCTTT | 1 | 2 | NC | NC |
| 823 | 1531 | AGAAATAATTTGAGAACCTT | 2 | 2 | NC | NC |
| 824 | 1532 | CAGAAATAATTTGAGAACCT | 2 | 2 | NC | NC |
| 825 | 1533 | CCAGAAATAATTTGAGAACC | 2 | 2 | NC | NC |
| 826 | 1534 | GCCAGAAATAATTTGAGAAC | 1 | 2 | NC | NC |
| 827 | 1535 | TGCCAGAAATAATTTGAGAA | 1 | 2 | NC | NC |
| 828 | 1536 | ATGCCAGAAATAATTTGAGA | 2 | 2 | NC | NC |
| 829 | 1537 | AATGCCAGAAATAATTTGAG | 2 | 2 | NC | NC |
| 830 | 1538 | CAATGCCAGAAATAATTTGA | 2 | 2 | NC | NC |
| 831 | 1539 | ACAATGCCAGAAATAATTTG | 2 | 2 | NC | NC |
| 832 | 1540 | AACAATGCCAGAAATAATTT | 2 | 1 | NC | NC |
| 833 | 1541 | TAACAATGCCAGAAATAATT | 2 | 1 | NC | NC |
| 834 | 1542 | TTAACAATGCCAGAAATAAT | 1 | 0 | NC | NC |
| 835 | 1543 | GTTAACAATGCCAGAAATAA | 1 | 1 | NC | NC |
| 836 | 1544 | AGTTAACAATGCCAGAAATA | 1 | 1 | NC | NC |
| 837 | 1545 | AAGTTAACAATGCCAGAAAT | 2 | 2 | NC | NC |
| 838 | 1546 | TAAGTTAACAATGCCAGAAA | 2 | 2 | NC | NC |
| 839 | 1547 | CTAAGTTAACAATGCCAGAA | 2 | 2 | NC | NC |
| 840 | 1548 | TCTAAGTTAACAATGCCAGA | 2 | 2 | NC | NC |
| 841 | 1549 | CTCTAAGTTAACAATGCCAG | 2 | 2 | NC | NC |
| 842 | 1550 | TCTCTAAGTTAACAATGCCA | 2 | 2 | NC | NC |
| 843 | 1551 | TTCTCTAAGTTAACAATGCC | 1 | 1 | NC | NC |
| 844 | 1552 | CTTCTCTAAGTTAACAATGC | 2 | 1 | NC | NC |
| 845 | 1553 | GCTTCTCTAAGTTAACAATG | 2 | 2 | NC | NC |
| 846 | 1554 | GGCTTCTCTAAGTTAACAAT | 2 | 2 | NC | NC |
| 847 | 1555 | AGGCTTCTCTAAGTTAACAA | 2 | 2 | NC | NC |
| 848 | 1556 | CAGGCTTCTCTAAGTTAACA | 2 | 2 | NC | NC |
| 849 | 1557 | ACAGGCTTCTCTAAGTTAAC | 2 | 2 | NC | NC |
| 850 | 1558 | CACAGGCTTCTCTAAGTTAA | 2 | 2 | NC | NC |
| 851 | 1559 | TCACAGGCTTCTCTAAGTTA | 2 | 2 | NC | NC |
| 852 | 1560 | ATCACAGGCTTCTCTAAGTT | 2 | 2 | NC | NC |
| 853 | 1561 | AATCACAGGCTTCTCTAAGT | 2 | 2 | NC | NC |
| 854 | 1562 | AAATCACAGGCTTCTCTAAG | 2 | 2 | NC | NC |
| 855 | 1563 | CAAATCACAGGCTTCTCTAA | 2 | 2 | NC | NC |
| 856 | 1564 | GCAAATCACAGGCTTCTCTA | 2 | 2 | NC | NC |
| 857 | 1565 | AGCAAATCACAGGCTTCTCT | 1 | 1 | NC | NC |
| 858 | 1566 | GAGCAAATCACAGGCTTCTC | 1 | 1 | NC | NC |
| 859 | 1567 | AGAGCAAATCACAGGCTTCT | 2 | 1 | NC | NC |
| 860 | 1568 | AAGAGCAAATCACAGGCTTC | 2 | 2 | NC | NC |
| 861 | 1569 | AAAGAGCAAATCACAGGCTT | 2 | 2 | NC | NC |
| 862 | 1571 | CCAAAGAGCAAATCACAGGC | 1 | 2 | NC | NC |
| 863 | 1572 | GCCAAAGAGCAAATCACAGG | 2 | 1 | NC | NC |
| 864 | 1573 | AGCCAAAGAGCAAATCACAG | 1 | 1 | NC | NC |
| 865 | 1574 | CAGCCAAAGAGCAAATCACA | 1 | 1 | NC | NC |
| 866 | 1575 | GCAGCCAAAGAGCAAATCAC | 2 | 1 | NC | NC |
| 867 | 1576 | GGCAGCCAAAGAGCAAATCA | 2 | 1 | NC | NC |
| 868 | 1577 | TGGCAGCCAAAGAGCAAATC | 2 | 2 | NC | NC |
| 869 | 1578 | ATGGCAGCCAAAGAGCAAAT | 1 | 2 | NC | NC |
| 870 | 1579 | GATGGCAGCCAAAGAGCAAA | 1 | 1 | NC | NC |
| 871 | 1580 | TGATGGCAGCCAAAGAGCAA | 1 | 1 | NC | NC |
| 872 | 1581 | ATGATGGCAGCCAAAGAGCA | 2 | 2 | NC | NC |
| 873 | 1582 | TATGATGGCAGCCAAAGAGC | 2 | 2 | NC | NC |
| 874 | 1583 | TTATGATGGCAGCCAAAGAG | 1 | 2 | NC | NC |
| 875 | 1584 | TTTATGATGGCAGCCAAAGA | 1 | 1 | NC | NC |
| 876 | 1585 | TTTTATGATGGCAGCCAAAG | 1 | 1 | NC | NC |
| 877 | 1586 | ATTTTATGATGGCAGCCAAA | 2 | 1 | NC | NC |
| 878 | 1587 | TATTTTATGATGGCAGCCAA | 1 | 1 | NC | NC |
| 879 | 1589 | GGTATTTTATGATGGCAGCC | 1 | 1 | NC | NC |
| 880 | 1590 | AGGTATTTTATGATGGCAGC | 2 | 1 | NC | NC |
| 881 | 1591 | GAGGTATTTTATGATGGCAG | 2 | 1 | NC | NC |
| 882 | 1592 | TGAGGTATTTTATGATGGCA | 1 | 1 | NC | NC |
| 883 | 1593 | TTGAGGTATTTTATGATGGC | 2 | 2 | NC | NC |
| 884 | 1594 | TTTGAGGTATTTTATGATGG | 2 | 2 | NC | NC |
| 885 | 1595 | CTTTGAGGTATTTTATGATG | 2 | 2 | NC | NC |
| 886 | 1596 | TCTTTGAGGTATTTTATGAT | 1 | 1 | NC | NC |
| 887 | 1597 | TTCTTTGAGGTATTTTATGA | 1 | 1 | NC | NC |
| 888 | 1598 | ATTCTTTGAGGTATTTTATG | 1 | 1 | NC | NC |
| 889 | 1600 | GAATTCTTTGAGGTATTTTA | 2 | 2 | NC | NC |
| 890 | 1601 | TGAATTCTTTGAGGTATTTT | 1 | 1 | NC | NC |
| 891 | 1602 | TTGAATTCTTTGAGGTATTT | 2 | 1 | NC | NC |
| 892 | 1603 | GTTGAATTCTTTGAGGTATT | 2 | 1 | NC | NC |
| 893 | 1604 | AGTTGAATTCTTTGAGGTAT | 2 | 2 | NC | NC |
| 894 | 1605 | AAGTTGAATTCTTTGAGGTA | 2 | 2 | NC | NC |
| 895 | 1606 | CAAGTTGAATTCTTTGAGGT | 2 | 2 | NC | NC |
| 896 | 1607 | CCAAGTTGAATTCTTTGAGG | 2 | 2 | NC | NC |
| 897 | 1608 | TCCAAGTTGAATTCTTTGAG | 2 | 2 | NC | NC |
| 898 | 1609 | TTCCAAGTTGAATTCTTTGA | 1 | 2 | NC | NC |
| 899 | 1610 | TTTCCAAGTTGAATTCTTTG | 2 | 1 | NC | NC |
| 900 | 1611 | TTTTCCAAGTTGAATTCTTT | 2 | 2 | NC | NC |
| 901 | 1612 | CTTTTCCAAGTTGAATTCTT | 2 | NC | NC | NC |
| 902 | 1613 | TCTTTTCCAAGTTGAATTCT | 1 | NC | NC | NC |
| 903 | 1614 | ATCTTTTCCAAGTTGAATTC | 2 | NC | NC | NC |
| 904 | 1615 | CATCTTTTCCAAGTTGAATT | 2 | NC | NC | NC |
| 905 | 1616 | GCATCTTTTCCAAGTTGAAT | 2 | NC | NC | NC |
| 906 | 1617 | AGCATCTTTTCCAAGTTGAA | 2 | NC | NC | NC |
| 907 | 1618 | GAGCATCTTTTCCAAGTTGA | 2 | NC | NC | NC |
| 908 | 1631 | TCTCAGGTTTGGAGAGCATC | 3 | NC | NC | NC |
| 909 | 1637 | TAAAATTCTCAGGTTTGGAG | 1 | 2 | NC | NC |
| 910 | 1638 | TTAAAATTCTCAGGTTTGGA | 2 | 2 | NC | NC |
| 911 | 1639 | TTTAAAATTCTCAGGTTTGG | 2 | 1 | NC | NC |
| 912 | 1640 | GTTTAAAATTCTCAGGTTTG | 1 | 1 | NC | NC |
| 913 | 1641 | TGTTTAAAATTCTCAGGTTT | 2 | 1 | NC | NC |
| 914 | 1642 | CTGTTTAAAATTCTCAGGTT | 2 | 2 | NC | NC |
| 915 | 1643 | GCTGTTTAAAATTCTCAGGT | 2 | 2 | NC | NC |
| 916 | 1644 | AGCTGTTTAAAATTCTCAGG | 2 | 1 | NC | NC |
| 917 | 1645 | TAGCTGTTTAAAATTCTCAG | 1 | 2 | NC | NC |
| 918 | 1646 | ATAGCTGTTTAAAATTCTCA | 2 | 1 | NC | NC |
| 919 | 1647 | GATAGCTGTTTAAAATTCTC | 2 | 2 | NC | NC |
| 920 | 1648 | TGATAGCTGTTTAAAATTCT | 1 | 1 | NC | NC |
| 921 | 1649 | TTGATAGCTGTTTAAAATTC | 2 | 1 | NC | NC |
| 922 | 1650 | CTTGATAGCTGTTTAAAATT | 2 | 1 | NC | NC |
| 923 | 1651 | ACTTGATAGCTGTTTAAAAT | 1 | 2 | NC | NC |
| 924 | 1652 | TACTTGATAGCTGTTTAAAA | 1 | 2 | NC | NC |
| 925 | 1653 | TTACTTGATAGCTGTTTAAA | 2 | 2 | NC | NC |
| 926 | 1654 | TTTACTTGATAGCTGTTTAA | 2 | 2 | NC | NC |
| 927 | 1655 | TTTTACTTGATAGCTGTTTA | 1 | 1 | NC | NC |
| 928 | 1656 | ATTTTACTTGATAGCTGTTT | 2 | 2 | NC | NC |
| 929 | 1657 | CATTTTACTTGATAGCTGTT | 2 | 2 | NC | NC |
| 930 | 1658 | CCATTTTACTTGATAGCTGT | 2 | 2 | NC | NC |
| 931 | 1659 | TCCATTTTACTTGATAGCTG | 2 | 2 | NC | NC |
| 932 | 1660 | TTCCATTTTACTTGATAGCT | 2 | 2 | NC | NC |
| 933 | 1661 | ATTCCATTTTACTTGATAGC | 2 | 2 | NC | NC |
| 934 | 1662 | AATTCCATTTTACTTGATAG | 2 | 1 | NC | NC |
| 935 | 1666 | CATAAATTCCATTTTACTTG | 2 | 1 | NC | NC |
| 936 | 1668 | GTCATAAATTCCATTTTACT | 2 | 2 | NC | NC |
| 937 | 1669 | TGTCATAAATTCCATTTTAC | 1 | 1 | NC | NC |
| 938 | 1676 | CATTAATTGTCATAAATTCC | 2 | 1 | NC | NC |
| 939 | 1677 | CCATTAATTGTCATAAATTC | 2 | 1 | NC | NC |
| 940 | 1680 | GTTCCATTAATTGTCATAAA | 2 | 2 | NC | NC |
| 941 | 1681 | TGTTCCATTAATTGTCATAA | 2 | 2 | NC | NC |
| 942 | 1682 | TTGTTCCATTAATTGTCATA | 1 | 1 | NC | NC |
| 943 | 1683 | GTTGTTCCATTAATTGTCAT | 1 | 1 | NC | NC |
| 944 | 1684 | TGTTGTTCCATTAATTGTCA | 1 | 1 | NC | NC |
| 945 | 1685 | ATGTTGTTCCATTAATTGTC | 2 | 2 | NC | NC |
| 946 | 1686 | AATGTTGTTCCATTAATTGT | 1 | 1 | NC | NC |
| 947 | 1687 | TAATGTTGTTCCATTAATTG | 2 | 1 | NC | NC |
| 948 | 1691 | TCCTTAATGTTGTTCCATTA | 2 | 2 | NC | NC |
| 949 | 1693 | ATTCCTTAATGTTGTTCCAT | 2 | 2 | NC | NC |
| 950 | 1694 | GATTCCTTAATGTTGTTCCA | 2 | 2 | NC | NC |
| 951 | 1695 | AGATTCCTTAATGTTGTTCC | 2 | 2 | NC | NC |
| 952 | 1696 | CAGATTCCTTAATGTTGTTC | 2 | 2 | NC | NC |
| 953 | 1697 | CCAGATTCCTTAATGTTGTT | 1 | 2 | NC | NC |
| 954 | 1698 | TCCAGATTCCTTAATGTTGT | 1 | 2 | NC | NC |
| 955 | 1699 | TTCCAGATTCCTTAATGTTG | 2 | 2 | NC | NC |
| 956 | 1700 | TTTCCAGATTCCTTAATGTT | 2 | 1 | NC | NC |
| 957 | 1701 | ATTTCCAGATTCCTTAATGT | 2 | 1 | NC | NC |
| 958 | 1702 | GATTTCCAGATTCCTTAATG | 2 | 2 | NC | NC |
| 959 | 1703 | GGATTTCCAGATTCCTTAAT | 2 | 2 | NC | NC |
| 960 | 1704 | AGGATTTCCAGATTCCTTAA | 2 | 2 | NC | NC |
| 961 | 1705 | TAGGATTTCCAGATTCCTTA | 2 | 2 | NC | NC |
| 962 | 1706 | GTAGGATTTCCAGATTCCTT | 1 | 2 | NC | NC |
| 963 | 1715 | TCTGATTCTGTAGGATTTCC | 1 | 2 | NC | NC |
| 964 | 1716 | GTCTGATTCTGTAGGATTTC | 2 | 2 | NC | NC |
| 965 | 1717 | AGTCTGATTCTGTAGGATTT | 2 | 2 | NC | NC |
| 966 | 1718 | CAGTCTGATTCTGTAGGATT | 2 | 3 | NC | NC |
| 967 | 1719 | TCAGTCTGATTCTGTAGGAT | 2 | 2 | NC | NC |
| 968 | 1720 | ATCAGTCTGATTCTGTAGGA | 2 | 3 | NC | NC |
| 969 | 1721 | TATCAGTCTGATTCTGTAGG | 3 | 3 | NC | NC |
| 970 | 1722 | ATATCAGTCTGATTCTGTAG | 2 | 2 | NC | NC |
| 971 | 1723 | CATATCAGTCTGATTCTGTA | 2 | 2 | NC | NC |
| 972 | 1724 | TCATATCAGTCTGATTCTGT | 2 | 2 | NC | NC |
| 973 | 1725 | TTCATATCAGTCTGATTCTG | 1 | 2 | 2 | 2 |
| 974 | 1726 | TTTCATATCAGTCTGATTCT | 2 | 2 | NC | NC |
| 975 | 1727 | TTTTCATATCAGTCTGATTC | 2 | 2 | NC | NC |
| 976 | 1728 | GTTTTCATATCAGTCTGATT | 2 | 2 | NC | NC |
| 977 | 1730 | TGGTTTTCATATCAGTCTGA | 2 | 2 | NC | NC |
| 978 | 1731 | TTGGTTTTCATATCAGTCTG | 2 | 1 | NC | NC |
| 979 | 1732 | TTTGGTTTTCATATCAGTCT | 1 | 2 | NC | NC |
| 980 | 1733 | CTTTGGTTTTCATATCAGTC | 1 | 2 | NC | NC |
| 981 | 1734 | CCTTTGGTTTTCATATCAGT | 2 | 2 | NC | NC |
| 982 | 1735 | TCCTTTGGTTTTCATATCAG | 2 | 2 | NC | NC |
| 983 | 1736 | TTCCTTTGGTTTTCATATCA | 2 | 2 | NC | NC |
| 984 | 1737 | CTTCCTTTGGTTTTCATATC | 2 | 2 | NC | NC |
| 985 | 1738 | ACTTCCTTTGGTTTTCATAT | 1 | 1 | NC | NC |
| 986 | 1739 | AACTTCCTTTGGTTTTCATA | 2 | 2 | NC | NC |
| 987 | 1740 | AAACTTCCTTTGGTTTTCAT | 2 | 2 | NC | NC |
| 988 | 1741 | CAAACTTCCTTTGGTTTTCA | 2 | 2 | NC | NC |
| 989 | 1749 | ACCCACAGCAAACTTCCTTT | 2 | 2 | NC | NC |
| 990 | 1750 | AACCCACAGCAAACTTCCTT | 2 | 2 | NC | NC |
| 991 | 1751 | AAACCCACAGCAAACTTCCT | 1 | 2 | NC | NC |
| 992 | 1752 | AAAACCCACAGCAAACTTCC | 2 | 2 | NC | NC |
| 993 | 1753 | TAAAACCCACAGCAAACTTC | 2 | 2 | NC | NC |
| 994 | 1754 | CTAAAACCCACAGCAAACTT | 2 | 2 | NC | NC |
| 995 | 1755 | TCTAAAACCCACAGCAAACT | 2 | 1 | NC | NC |
| 996 | 1756 | GTCTAAAACCCACAGCAAAC | 2 | 2 | NC | NC |
| 997 | 1769 | AAGTTTTAGTGTGGTCTAAA | 2 | 2 | 2 | NC |
| 998 | 1770 | GAAGTTTTAGTGTGGTCTAA | 2 | 2 | 2 | NC |
| 999 | 1771 | TGAAGTTTTAGTGTGGTCTA | 2 | 2 | 2 | NC |
| 1000 | 1772 | ATGAAGTTTTAGTGTGGTCT | 2 | 2 | 2 | NC |
| 1001 | 1773 | AATGAAGTTTTAGTGTGGTC | 2 | 2 | 2 | NC |
| 1002 | 1774 | AAATGAAGTTTTAGTGTGGT | 2 | 2 | 2 | NC |
| 1003 | 1775 | CAAATGAAGTTTTAGTGTGG | 2 | 1 | 2 | NC |
| 1004 | 1776 | CCAAATGAAGTTTTAGTGTG | 2 | 2 | 2 | NC |
| 1005 | 1777 | CCCAAATGAAGTTTTAGTGT | 2 | 2 | 2 | NC |
| 1006 | 1778 | TCCCAAATGAAGTTTTAGTG | 2 | 2 | 2 | NC |
| 1007 | 1779 | CTCCCAAATGAAGTTTTAGT | 2 | 2 | 1 | NC |
| 1008 | 1780 | TCTCCCAAATGAAGTTTTAG | 2 | 2 | 2 | NC |
| 1009 | 1781 | GTCTCCCAAATGAAGTTTTA | 1 | 1 | NC | NC |
| 1010 | 1782 | CGTCTCCCAAATGAAGTTTT | 2 | 2 | NC | NC |
| 1011 | 1783 | CCGTCTCCCAAATGAAGTTT | 2 | 2 | NC | NC |
| 1012 | 1784 | TCCGTCTCCCAAATGAAGTT | 2 | 2 | NC | NC |
| 1013 | 1785 | TTCCGTCTCCCAAATGAAGT | 2 | 2 | NC | NC |
| 1014 | 1786 | CTTCCGTCTCCCAAATGAAG | 2 | 2 | NC | NC |
| 1015 | 1787 | ACTTCCGTCTCCCAAATGAA | 2 | 2 | NC | NC |
| 1016 | 1788 | AACTTCCGTCTCCCAAATGA | 2 | 2 | NC | NC |
| 1017 | 1789 | TAACTTCCGTCTCCCAAATG | 2 | 2 | NC | NC |
| 1018 | 1790 | TTAACTTCCGTCTCCCAAAT | 2 | 1 | NC | NC |
| 1019 | 1791 | TTTAACTTCCGTCTCCCAAA | 3 | 2 | NC | NC |
| 1020 | 1792 | CTTTAACTTCCGTCTCCCAA | 2 | 1 | NC | NC |
| 1021 | 1793 | TCTTTAACTTCCGTCTCCCA | 3 | 2 | NC | NC |
| 1022 | 1794 | TTCTTTAACTTCCGTCTCCC | 2 | 2 | NC | NC |
| 1023 | 1795 | CTTCTTTAACTTCCGTCTCC | 1 | 1 | NC | NC |
| 1024 | 1796 | ACTTCTTTAACTTCCGTCTC | 1 | 1 | NC | NC |
| 1025 | 1797 | CACTTCTTTAACTTCCGTCT | 2 | 2 | NC | NC |
| 1026 | 1798 | CCACTTCTTTAACTTCCGTC | 2 | 2 | NC | NC |
| 1027 | 1799 | CCCACTTCTTTAACTTCCGT | 2 | 2 | NC | NC |
| 1028 | 1800 | ACCCACTTCTTTAACTTCCG | 3 | 2 | NC | NC |
| 1029 | 1801 | CACCCACTTCTTTAACTTCC | 2 | 2 | NC | NC |
| 1030 | 1802 | TCACCCACTTCTTTAACTTC | 2 | 2 | NC | NC |
| 1031 | 1803 | GTCACCCACTTCTTTAACTT | 2 | 2 | NC | NC |
| 1032 | 1804 | GGTCACCCACTTCTTTAACT | 2 | 2 | NC | NC |
| 1033 | 1818 | TTAAGGAGTGGCTGGGTCAC | 2 | 1 | NC | NC |
| 1034 | 1819 | TTTAAGGAGTGGCTGGGTCA | 2 | 2 | NC | NC |
| 1035 | 1820 | ATTTAAGGAGTGGCTGGGTC | 2 | 2 | NC | NC |
| 1036 | 1821 | AATTTAAGGAGTGGCTGGGT | 2 | 2 | NC | NC |
| 1037 | 1822 | TAATTTAAGGAGTGGCTGGG | 2 | 1 | NC | NC |
| 1038 | 1823 | TTAATTTAAGGAGTGGCTGG | 2 | 2 | NC | NC |
| 1039 | 1824 | CTTAATTTAAGGAGTGGCTG | 1 | 2 | NC | NC |
| 1040 | 1836 | GCATTTATTTCCCTTAATTT | 2 | 2 | 2 | NC |
| 1041 | 1837 | GGCATTTATTTCCCTTAATT | 2 | 2 | 1 | NC |
| 1042 | 1838 | GGGCATTTATTTCCCTTAAT | 2 | 1 | 1 | NC |
| 1043 | 1839 | CGGGCATTTATTTCCCTTAA | 2 | 2 | 2 | NC |
| 1044 | 1840 | CCGGGCATTTATTTCCCTTA | 2 | 2 | NC | NC |
| 1045 | 1841 | GCCGGGCATTTATTTCCCTT | 2 | 2 | NC | NC |
| 1046 | 1842 | AGCCGGGCATTTATTTCCCT | 2 | 1 | NC | NC |
| 1047 | 1844 | CAAGCCGGGCATTTATTTCC | 2 | 2 | NC | NC |
| 1048 | 1845 | TCAAGCCGGGCATTTATTTC | 2 | 3 | NC | NC |
| 1049 | 1846 | ATCAAGCCGGGCATTTATTT | 2 | 3 | NC | NC |
| 1050 | 1847 | CATCAAGCCGGGCATTTATT | 3 | 3 | NC | NC |
| 1051 | 1848 | GCATCAAGCCGGGCATTTAT | 3 | 3 | NC | NC |
| 1052 | 1860 | ACTTCCGATACAGCATCAAG | 2 | NC | NC | NC |
| 1053 | 1861 | AACTTCCGATACAGCATCAA | 2 | NC | NC | NC |
| 1054 | 1862 | GAACTTCCGATACAGCATCA | 2 | NC | NC | NC |
| 1055 | 1863 | AGAACTTCCGATACAGCATC | 2 | NC | NC | NC |
| 1056 | 1864 | GAGAACTTCCGATACAGCAT | 3 | NC | NC | NC |
| 1057 | 1865 | GGAGAACTTCCGATACAGCA | 3 | NC | NC | NC |
| 1058 | 1875 | GATTCTGAATGGAGAACTTC | 1 | 2 | NC | NC |
| 1059 | 1876 | AGATTCTGAATGGAGAACTT | 1 | 2 | NC | NC |
| 1060 | 1877 | TAGATTCTGAATGGAGAACT | 2 | 2 | NC | NC |
| 1061 | 1878 | CTAGATTCTGAATGGAGAAC | 2 | 2 | NC | NC |
| 1062 | 1879 | ACTAGATTCTGAATGGAGAA | 2 | 2 | NC | NC |
| 1063 | 1880 | CACTAGATTCTGAATGGAGA | 2 | 3 | NC | NC |
| 1064 | 1881 | ACACTAGATTCTGAATGGAG | 2 | 2 | NC | NC |
| 1065 | 1882 | CACACTAGATTCTGAATGGA | 2 | 2 | NC | NC |
| 1066 | 1883 | ACACACTAGATTCTGAATGG | 2 | 2 | NC | NC |
| 1067 | 1884 | AACACACTAGATTCTGAATG | 2 | 2 | NC | NC |
| 1068 | 1885 | AAACACACTAGATTCTGAAT | 2 | 2 | NC | NC |
| 1069 | 1886 | CAAACACACTAGATTCTGAA | 1 | 1 | NC | NC |
| 1070 | 1887 | CCAAACACACTAGATTCTGA | 1 | 1 | NC | NC |
| 1071 | 1888 | ACCAAACACACTAGATTCTG | 2 | 2 | NC | NC |
| 1072 | 1889 | GACCAAACACACTAGATTCT | 2 | 2 | NC | NC |
| 1073 | 1890 | TGACCAAACACACTAGATTC | 2 | 2 | NC | NC |
| 1074 | 1891 | CTGACCAAACACACTAGATT | 2 | 2 | NC | NC |
| 1075 | 1892 | TCTGACCAAACACACTAGAT | 2 | 2 | NC | NC |
| 1076 | 1893 | ATCTGACCAAACACACTAGA | 2 | 1 | NC | NC |
| 1077 | 1894 | TATCTGACCAAACACACTAG | 2 | 1 | NC | NC |
| 1078 | 1895 | CTATCTGACCAAACACACTA | 2 | 2 | NC | NC |
| 1079 | 1896 | TCTATCTGACCAAACACACT | 2 | 2 | NC | NC |
| 1080 | 1897 | TTCTATCTGACCAAACACAC | 2 | 2 | NC | NC |
| 1081 | 1898 | TTTCTATCTGACCAAACACA | 2 | 2 | NC | NC |
| 1082 | 1899 | TTTTCTATCTGACCAAACAC | 2 | 2 | NC | NC |
| 1083 | 1900 | ATTTTCTATCTGACCAAACA | 1 | 1 | NC | NC |
| 1084 | 1901 | GATTTTCTATCTGACCAAAC | 2 | 2 | NC | NC |
| 1085 | 1902 | TGATTTTCTATCTGACCAAA | 1 | 1 | NC | NC |
| 1086 | 1903 | ATGATTTTCTATCTGACCAA | 1 | 2 | NC | NC |
| 1087 | 1904 | GATGATTTTCTATCTGACCA | 1 | 2 | NC | NC |
| 1088 | 1905 | AGATGATTTTCTATCTGACC | 2 | 2 | NC | NC |
| 1089 | 1906 | TAGATGATTTTCTATCTGAC | 2 | 2 | NC | NC |
| 1090 | 1907 | GTAGATGATTTTCTATCTGA | 2 | 2 | NC | NC |
| 1091 | 1908 | CGTAGATGATTTTCTATCTG | 2 | 2 | NC | NC |
| 1092 | 1909 | ACGTAGATGATTTTCTATCT | 2 | 2 | NC | NC |
| 1093 | 1910 | TACGTAGATGATTTTCTATC | 2 | 2 | NC | NC |
| 1094 | 1911 | TTACGTAGATGATTTTCTAT | 2 | 2 | NC | NC |
| 1095 | 1912 | TTTACGTAGATGATTTTCTA | 2 | 2 | NC | NC |
| 1096 | 1913 | ATTTACGTAGATGATTTTCT | 2 | 2 | NC | NC |
| 1097 | 1914 | AATTTACGTAGATGATTTTC | 2 | 2 | NC | NC |
| 1098 | 1915 | CAATTTACGTAGATGATTTT | 2 | 2 | NC | NC |
| 1099 | 1916 | GCAATTTACGTAGATGATTT | 2 | 3 | NC | NC |
| 1100 | 1917 | GGCAATTTACGTAGATGATT | 2 | 3 | NC | NC |
| 1101 | 1918 | GGGCAATTTACGTAGATGAT | 3 | NC | NC | NC |
| 1102 | 1919 | CGGGCAATTTACGTAGATGA | 3 | NC | NC | NC |
| 1103 | 1920 | TCGGGCAATTTACGTAGATG | 2 | NC | NC | NC |
| 1104 | 1921 | GTCGGGCAATTTACGTAGAT | 2 | NC | NC | NC |
| 1105 | 1922 | TGTCGGGCAATTTACGTAGA | 2 | NC | NC | NC |
| 1106 | 1923 | ATGTCGGGCAATTTACGTAG | 2 | NC | NC | NC |
| 1107 | 1924 | TATGTCGGGCAATTTACGTA | 2 | NC | NC | NC |
| 1108 | 1925 | CTATGTCGGGCAATTTACGT | 2 | NC | NC | NC |
| 1109 | 1926 | TCTATGTCGGGCAATTTACG | 2 | NC | NC | NC |
| 1110 | 1927 | CTCTATGTCGGGCAATTTAC | 2 | NC | NC | NC |
| 1111 | 1928 | TCTCTATGTCGGGCAATTTA | 3 | NC | NC | NC |
| 1112 | 1929 | CTCTCTATGTCGGGCAATTT | 3 | NC | NC | NC |
| 1113 | 1930 | CCTCTCTATGTCGGGCAATT | 2 | NC | NC | NC |
| 1114 | 1931 | CCCTCTCTATGTCGGGCAAT | 2 | NC | NC | NC |
| 1115 | 1947 | TAAATGCTACAGAGTCCCCT | 1 | NC | NC | NC |
| 1116 | 1948 | ATAAATGCTACAGAGTCCCC | 2 | NC | NC | NC |
| 1117 | 1949 | GATAAATGCTACAGAGTCCC | 2 | NC | NC | NC |
| 1118 | 1950 | TGATAAATGCTACAGAGTCC | 2 | 2 | NC | NC |
| 1119 | 1951 | GTGATAAATGCTACAGAGTC | 2 | 2 | NC | NC |
| 1120 | 1952 | TGTGATAAATGCTACAGAGT | 2 | 2 | NC | NC |
| 1121 | 1953 | TTGTGATAAATGCTACAGAG | 1 | 1 | NC | NC |
| 1122 | 1954 | TTTGTGATAAATGCTACAGA | 1 | 1 | NC | NC |
| 1123 | 1955 | TTTTGTGATAAATGCTACAG | 2 | 1 | NC | NC |
| 1124 | 1956 | TTTTTGTGATAAATGCTACA | 2 | 1 | NC | NC |
| 1125 | 1972 | CTCTTGGGTAGAACATTTTT | 1 | 2 | NC | NC |
| 1126 | 1973 | ACTCTTGGGTAGAACATTTT | 2 | 2 | NC | NC |
| 1127 | 1974 | AACTCTTGGGTAGAACATTT | 2 | 2 | NC | NC |
| 1128 | 1975 | GAACTCTTGGGTAGAACATT | 2 | 3 | NC | NC |
| 1129 | 1976 | AGAACTCTTGGGTAGAACAT | 2 | 3 | NC | NC |
| 1130 | 1977 | AAGAACTCTTGGGTAGAACA | 2 | 2 | NC | NC |
| 1131 | 1978 | GAAGAACTCTTGGGTAGAAC | 2 | 2 | NC | NC |
| 1132 | 1979 | AGAAGAACTCTTGGGTAGAA | 2 | 2 | NC | NC |
| 1133 | 1988 | TGACAATCAAGAAGAACTCT | 2 | 1 | NC | NC |
| 1134 | 1989 | TTGACAATCAAGAAGAACTC | 2 | 2 | NC | NC |
| 1135 | 1990 | TTTGACAATCAAGAAGAACT | 2 | 2 | NC | NC |
| 1136 | 1991 | TTTTGACAATCAAGAAGAAC | 2 | 2 | NC | NC |
| 1137 | 1992 | GTTTTGACAATCAAGAAGAA | 2 | 2 | NC | NC |
| 1138 | 1993 | AGTTTTGACAATCAAGAAGA | 2 | NC | NC | NC |
| 1139 | 1994 | AAGTTTTGACAATCAAGAAG | 2 | NC | NC | NC |
| 1140 | 1995 | AAAGTTTTGACAATCAAGAA | 2 | NC | NC | NC |
| 1141 | 1996 | TAAAGTTTTGACAATCAAGA | 2 | NC | NC | NC |
| 1142 | 1997 | ATAAAGTTTTGACAATCAAG | 2 | NC | NC | NC |
| 1143 | 2000 | GATATAAAGTTTTGACAATC | 1 | NC | NC | NC |
| 1144 | 2002 | GTGATATAAAGTTTTGACAA | 2 | NC | NC | NC |
| 1145 | 2003 | GGTGATATAAAGTTTTGACA | 2 | NC | NC | NC |
| 1146 | 2004 | AGGTGATATAAAGTTTTGAC | 2 | NC | NC | NC |
| 1147 | 2005 | TAGGTGATATAAAGTTTTGA | 1 | NC | NC | NC |
| 1148 | 2006 | TTAGGTGATATAAAGTTTTG | 1 | NC | NC | NC |
| 1149 | 2008 | CTTTAGGTGATATAAAGTTT | 2 | NC | NC | NC |
| 1150 | 2012 | CTGACTTTAGGTGATATAAA | 2 | NC | NC | NC |
| 1151 | 2013 | TCTGACTTTAGGTGATATAA | 2 | 2 | NC | NC |
| 1152 | 2014 | TTCTGACTTTAGGTGATATA | 2 | 1 | NC | NC |
| 1153 | 2015 | ATTCTGACTTTAGGTGATAT | 1 | 1 | NC | NC |
| 1154 | 2016 | AATTCTGACTTTAGGTGATA | 1 | 1 | NC | NC |
| 1155 | 2017 | AAATTCTGACTTTAGGTGAT | 1 | 1 | NC | NC |
| 1156 | 2018 | GAAATTCTGACTTTAGGTGA | 1 | 1 | NC | NC |
| 1157 | 2019 | TGAAATTCTGACTTTAGGTG | 1 | 1 | NC | NC |
| 1158 | 2020 | TTGAAATTCTGACTTTAGGT | 1 | 1 | NC | NC |
| 1159 | 2021 | CTTGAAATTCTGACTTTAGG | 1 | 1 | NC | NC |
| 1160 | 2022 | GCTTGAAATTCTGACTTTAG | 2 | 1 | NC | NC |
| 1161 | 2023 | TGCTTGAAATTCTGACTTTA | 1 | 1 | NC | NC |
| 1162 | 2024 | TTGCTTGAAATTCTGACTTT | 1 | 2 | NC | NC |
| 1163 | 2025 | ATTGCTTGAAATTCTGACTT | 1 | 1 | NC | NC |
| 1164 | 2026 | TATTGCTTGAAATTCTGACT | 2 | 2 | NC | NC |
| 1165 | 2027 | TTATTGCTTGAAATTCTGAC | 2 | 2 | NC | NC |
| 1166 | 2028 | ATTATTGCTTGAAATTCTGA | 2 | 1 | NC | NC |
| 1167 | 2029 | TATTATTGCTTGAAATTCTG | 1 | 2 | NC | NC |
| 1168 | 2030 | GTATTATTGCTTGAAATTCT | 1 | 1 | NC | NC |
| 1169 | 2031 | GGTATTATTGCTTGAAATTC | 1 | 2 | NC | NC |
| 1170 | 2032 | AGGTATTATTGCTTGAAATT | 2 | 2 | NC | NC |
| 1171 | 2033 | CAGGTATTATTGCTTGAAAT | 1 | 1 | NC | NC |
| 1172 | 2034 | GCAGGTATTATTGCTTGAAA | 2 | 2 | NC | NC |
| 1173 | 2041 | ATTAACAGCAGGTATTATTG | 2 | 2 | NC | NC |
| 1174 | 2042 | AATTAACAGCAGGTATTATT | 1 | 2 | NC | NC |
| 1175 | 2043 | GAATTAACAGCAGGTATTAT | 2 | 2 | NC | NC |
| 1176 | 2044 | GGAATTAACAGCAGGTATTA | 2 | 2 | NC | NC |
| 1177 | 2045 | GGGAATTAACAGCAGGTATT | 2 | 2 | NC | NC |
| 1178 | 2046 | TGGGAATTAACAGCAGGTAT | 1 | 2 | NC | NC |
| 1179 | 2047 | GTGGGAATTAACAGCAGGTA | 2 | 2 | NC | NC |
| 1180 | 2048 | TGTGGGAATTAACAGCAGGT | 2 | NC | NC | NC |
| 1181 | 2049 | ATGTGGGAATTAACAGCAGG | 2 | NC | NC | NC |
| 1182 | 2050 | AATGTGGGAATTAACAGCAG | 2 | NC | NC | NC |
| 1183 | 2051 | GAATGTGGGAATTAACAGCA | 2 | NC | NC | NC |
| 1184 | 2052 | TGAATGTGGGAATTAACAGC | 2 | NC | NC | NC |
| 1185 | 2053 | CTGAATGTGGGAATTAACAG | 2 | NC | NC | NC |
| 1186 | 2054 | ACTGAATGTGGGAATTAACA | 2 | NC | NC | NC |
| 1187 | 2055 | GACTGAATGTGGGAATTAAC | 3 | NC | NC | NC |
| 1188 | 2056 | TGACTGAATGTGGGAATTAA | 2 | NC | NC | NC |
| 1189 | 2057 | CTGACTGAATGTGGGAATTA | 2 | NC | NC | NC |
| 1190 | 2058 | TCTGACTGAATGTGGGAATT | 1 | NC | NC | NC |
| 1191 | 2059 | GTCTGACTGAATGTGGGAAT | 2 | NC | NC | NC |
| 1192 | 2060 | AGTCTGACTGAATGTGGGAA | 2 | NC | NC | NC |
| 1193 | 2061 | AAGTCTGACTGAATGTGGGA | 2 | NC | NC | NC |
| 1194 | 2062 | CAAGTCTGACTGAATGTGGG | 2 | NC | NC | NC |
| 1195 | 2063 | GCAAGTCTGACTGAATGTGG | 2 | NC | NC | NC |
| 1196 | 2064 | AGCAAGTCTGACTGAATGTG | 2 | NC | NC | NC |
| 1197 | 2065 | GAGCAAGTCTGACTGAATGT | 2 | NC | NC | NC |
| 1198 | 2066 | GGAGCAAGTCTGACTGAATG | 2 | NC | NC | NC |
| 1199 | 2067 | CGGAGCAAGTCTGACTGAAT | 2 | NC | NC | NC |
| 1200 | 2068 | CCGGAGCAAGTCTGACTGAA | 2 | NC | NC | NC |
| 1201 | 2069 | TCCGGAGCAAGTCTGACTGA | 2 | NC | NC | NC |
| 1202 | 2081 | CTAAAATAACGGTCCGGAGC | 3 | NC | NC | NC |
| 1203 | 2082 | TCTAAAATAACGGTCCGGAG | 3 | NC | NC | NC |
| 1204 | 2083 | TTCTAAAATAACGGTCCGGA | 3 | NC | NC | NC |
| 1205 | 2084 | TTTCTAAAATAACGGTCCGG | 2 | NC | NC | NC |
| 1206 | 2085 | ATTTCTAAAATAACGGTCCG | 2 | NC | NC | NC |
| 1207 | 2086 | AATTTCTAAAATAACGGTCC | 2 | NC | NC | NC |
| 1208 | 2087 | GAATTTCTAAAATAACGGTC | 2 | NC | NC | NC |
| 1209 | 2088 | GGAATTTCTAAAATAACGGT | 2 | 2 | NC | NC |
| 1210 | 2089 | AGGAATTTCTAAAATAACGG | 2 | 2 | NC | NC |
| 1211 | 2090 | CAGGAATTTCTAAAATAACG | 2 | 2 | NC | NC |
| 1212 | 2091 | TCAGGAATTTCTAAAATAAC | 1 | 2 | NC | NC |
| 1213 | 2093 | GTTCAGGAATTTCTAAAATA | 2 | 1 | NC | NC |
| 1214 | 2094 | AGTTCAGGAATTTCTAAAAT | 2 | 2 | NC | NC |
| 1215 | 2095 | GAGTTCAGGAATTTCTAAAA | 1 | 2 | NC | NC |
| 1216 | 2096 | GGAGTTCAGGAATTTCTAAA | 2 | 2 | NC | NC |
| 1217 | 2097 | AGGAGTTCAGGAATTTCTAA | 1 | 2 | NC | NC |
| 1218 | 2098 | GAGGAGTTCAGGAATTTCTA | 1 | 2 | NC | NC |
| 1219 | 2099 | TGAGGAGTTCAGGAATTTCT | 2 | 1 | NC | NC |
| 1220 | 2108 | CCACTGGACTGAGGAGTTCA | 2 | 2 | NC | NC |
| 1221 | 2109 | TCCACTGGACTGAGGAGTTC | 2 | 2 | NC | NC |
| 1222 | 2113 | ATGCTCCACTGGACTGAGGA | 2 | 2 | NC | NC |
| 1223 | 2114 | AATGCTCCACTGGACTGAGG | 3 | 2 | NC | NC |
| 1224 | 2115 | TAATGCTCCACTGGACTGAG | 2 | 2 | NC | NC |
| 1225 | 2116 | GTAATGCTCCACTGGACTGA | 2 | 2 | NC | NC |
| 1226 | 2117 | AGTAATGCTCCACTGGACTG | 2 | 2 | NC | NC |
| 1227 | 2118 | AAGTAATGCTCCACTGGACT | 2 | 2 | NC | NC |
| 1228 | 2119 | TAAGTAATGCTCCACTGGAC | 1 | 2 | NC | NC |
| 1229 | 2120 | TTAAGTAATGCTCCACTGGA | 2 | 2 | NC | NC |
| 1230 | 2121 | TTTAAGTAATGCTCCACTGG | 2 | 2 | NC | NC |
| 1231 | 2122 | CTTTAAGTAATGCTCCACTG | 2 | 2 | NC | NC |
| 1232 | 2123 | TCTTTAAGTAATGCTCCACT | 2 | 2 | NC | NC |
| 1233 | 2124 | ATCTTTAAGTAATGCTCCAC | 2 | 2 | NC | NC |
| 1234 | 2125 | TATCTTTAAGTAATGCTCCA | 1 | 2 | NC | NC |
| 1235 | 2126 | GTATCTTTAAGTAATGCTCC | 2 | 2 | NC | NC |
| 1236 | 2127 | AGTATCTTTAAGTAATGCTC | 2 | 2 | NC | NC |
| 1237 | 2128 | GAGTATCTTTAAGTAATGCT | 2 | 2 | NC | NC |
| 1238 | 2129 | TGAGTATCTTTAAGTAATGC | 2 | 2 | NC | NC |
| 1239 | 2130 | TTGAGTATCTTTAAGTAATG | 2 | 2 | NC | NC |
| 1240 | 2132 | CATTGAGTATCTTTAAGTAA | 2 | 2 | NC | NC |
| 1241 | 2133 | TCATTGAGTATCTTTAAGTA | 2 | 2 | NC | NC |
| 1242 | 2134 | TTCATTGAGTATCTTTAAGT | 2 | 2 | NC | NC |
| 1243 | 2135 | GTTCATTGAGTATCTTTAAG | 1 | 1 | NC | NC |
| 1244 | 2136 | TGTTCATTGAGTATCTTTAA | 2 | 2 | NC | NC |
| 1245 | 2137 | TTGTTCATTGAGTATCTTTA | 2 | 2 | NC | NC |
| 1246 | 2138 | CTTGTTCATTGAGTATCTTT | 2 | 2 | NC | NC |
| 1247 | 2139 | GCTTGTTCATTGAGTATCTT | 2 | 2 | NC | NC |
| 1248 | 2140 | AGCTTGTTCATTGAGTATCT | 2 | 2 | NC | NC |
| 1249 | 2141 | CAGCTTGTTCATTGAGTATC | 2 | 2 | NC | NC |
| 1250 | 2142 | GCAGCTTGTTCATTGAGTAT | 1 | 2 | NC | NC |
| 1251 | 2143 | GGCAGCTTGTTCATTGAGTA | 2 | 2 | NC | NC |
| 1252 | 2144 | TGGCAGCTTGTTCATTGAGT | 2 | 3 | NC | NC |
| 1253 | 2145 | TTGGCAGCTTGTTCATTGAG | 1 | 2 | NC | NC |
| 1254 | 2146 | TTTGGCAGCTTGTTCATTGA | 2 | 2 | NC | NC |
| 1255 | 2147 | CTTTGGCAGCTTGTTCATTG | 2 | 2 | NC | NC |
| 1256 | 2148 | ACTTTGGCAGCTTGTTCATT | 2 | 2 | NC | NC |
| 1257 | 2149 | AACTTTGGCAGCTTGTTCAT | 2 | 2 | NC | NC |
| 1258 | 2150 | CAACTTTGGCAGCTTGTTCA | 2 | 2 | NC | NC |
| 1259 | 2162 | CAGTTTTATCCCCAACTTTG | 2 | 2 | NC | NC |
| 1260 | 2163 | TCAGTTTTATCCCCAACTTT | 2 | 1 | NC | NC |
| 1261 | 2164 | TTCAGTTTTATCCCCAACTT | 2 | 1 | NC | NC |
| 1262 | 2165 | ATTCAGTTTTATCCCCAACT | 1 | 1 | NC | NC |
| 1263 | 2166 | AATTCAGTTTTATCCCCAAC | 2 | 1 | NC | NC |
| 1264 | 2167 | TAATTCAGTTTTATCCCCAA | 2 | 1 | NC | NC |
| 1265 | 2168 | ATAATTCAGTTTTATCCCCA | 1 | 1 | NC | NC |
| 1266 | 2169 | AATAATTCAGTTTTATCCCC | 1 | 1 | NC | NC |
| 1267 | 2170 | AAATAATTCAGTTTTATCCC | 1 | 1 | NC | NC |
| 1268 | 2177 | GGTCTTTAAATAATTCAGTT | 2 | 2 | NC | NC |
| 1269 | 2178 | AGGTCTTTAAATAATTCAGT | 2 | 1 | NC | NC |
| 1270 | 2179 | AAGGTCTTTAAATAATTCAG | 2 | 1 | NC | NC |
| 1271 | 2181 | GAAAGGTCTTTAAATAATTC | 1 | 1 | NC | NC |
| 1272 | 2183 | CAGAAAGGTCTTTAAATAAT | 1 | 2 | NC | NC |
| 1273 | 2184 | TCAGAAAGGTCTTTAAATAA | 1 | 2 | NC | NC |
| 1274 | 2185 | GTCAGAAAGGTCTTTAAATA | 2 | 2 | NC | NC |
| 1275 | 2186 | AGTCAGAAAGGTCTTTAAAT | 2 | 1 | NC | NC |
| 1276 | 2187 | AAGTCAGAAAGGTCTTTAAA | 2 | 2 | NC | NC |
| 1277 | 2188 | GAAGTCAGAAAGGTCTTTAA | 1 | 2 | NC | NC |
| 1278 | 2189 | GGAAGTCAGAAAGGTCTTTA | 1 | 2 | NC | NC |
| 1279 | 2190 | GGGAAGTCAGAAAGGTCTTT | 2 | 1 | NC | NC |
| 1280 | 2191 | AGGGAAGTCAGAAAGGTCTT | 2 | 1 | NC | NC |
| 1281 | 2192 | AAGGGAAGTCAGAAAGGTCT | 2 | 2 | NC | NC |
| 1282 | 2193 | AAAGGGAAGTCAGAAAGGTC | 2 | 2 | NC | NC |
| 1283 | 2194 | TAAAGGGAAGTCAGAAAGGT | 2 | 2 | NC | NC |
| 1284 | 2195 | TTAAAGGGAAGTCAGAAAGG | 1 | 1 | NC | NC |
| 1285 | 2196 | ATTAAAGGGAAGTCAGAAAG | 1 | 1 | NC | NC |
| 1286 | 2197 | TATTAAAGGGAAGTCAGAAA | 1 | 2 | NC | NC |
| 1287 | 2198 | TTATTAAAGGGAAGTCAGAA | 1 | 2 | NC | NC |
| 1288 | 2199 | TTTATTAAAGGGAAGTCAGA | 1 | 1 | 2 | 1 |
| 1289 | 2200 | TTTTATTAAAGGGAAGTCAG | 1 | 2 | 2 | 2 |
| 1290 | 2201 | TTTTTATTAAAGGGAAGTCA | 2 | 2 | 1 | 2 |
| 1291 | 2217 | ATTTCATCCTTCCTCTTTTT | 1 | 1 | NC | NC |
| 1292 | 2218 | AATTTCATCCTTCCTCTTTT | 1 | 1 | NC | NC |
| 1293 | 2219 | GAATTTCATCCTTCCTCTTT | 2 | 2 | NC | NC |
| 1294 | 2220 | TGAATTTCATCCTTCCTCTT | 2 | 1 | NC | NC |
| 1295 | 2221 | TTGAATTTCATCCTTCCTCT | 1 | 1 | NC | NC |
| 1296 | 2222 | CTTGAATTTCATCCTTCCTC | 2 | 1 | NC | NC |
| 1297 | 2223 | CCTTGAATTTCATCCTTCCT | 2 | 2 | NC | NC |
| 1298 | 2224 | ACCTTGAATTTCATCCTTCC | 2 | 2 | NC | NC |
| 1299 | 2225 | CACCTTGAATTTCATCCTTC | 2 | 2 | NC | NC |
| 1300 | 2226 | ACACCTTGAATTTCATCCTT | 1 | 1 | NC | NC |
| 1301 | 2227 | AACACCTTGAATTTCATCCT | 2 | 2 | NC | NC |
| 1302 | 2228 | TAACACCTTGAATTTCATCC | 2 | 2 | NC | NC |
| 1303 | 2229 | ATAACACCTTGAATTTCATC | 2 | NC | NC | NC |
| 1304 | 2230 | AATAACACCTTGAATTTCAT | 2 | NC | NC | NC |
| 1305 | 2231 | CAATAACACCTTGAATTTCA | 2 | NC | NC | NC |
| 1306 | 2232 | TCAATAACACCTTGAATTTC | 2 | NC | NC | NC |
| 1307 | 2233 | GTCAATAACACCTTGAATTT | 2 | NC | NC | NC |
| 1308 | 2234 | CGTCAATAACACCTTGAATT | 2 | NC | NC | NC |
| 1309 | 2235 | TCGTCAATAACACCTTGAAT | 2 | NC | NC | NC |
| 1310 | 2236 | CTCGTCAATAACACCTTGAA | 2 | NC | NC | NC |
| 1311 | 2237 | TCTCGTCAATAACACCTTGA | 2 | NC | NC | NC |
| 1312 | 2238 | ATCTCGTCAATAACACCTTG | 2 | NC | NC | NC |
| 1313 | 2239 | GATCTCGTCAATAACACCTT | 2 | NC | NC | NC |
| 1314 | 2240 | GGATCTCGTCAATAACACCT | 2 | NC | NC | NC |
| 1315 | 2241 | CGGATCTCGTCAATAACACC | 3 | NC | NC | NC |
| 1316 | 2265 | TTTCGTATTTCTTGCAAATG | 2 | 2 | NC | NC |
| 1317 | 2266 | TTTTCGTATTTCTTGCAAAT | 1 | 1 | NC | NC |
| 1318 | 2267 | TTTTTCGTATTTCTTGCAAA | 2 | 2 | NC | NC |
| 1319 | 2268 | ATTTTTCGTATTTCTTGCAA | 2 | 2 | NC | NC |
| 1320 | 2269 | TATTTTTCGTATTTCTTGCA | 2 | 2 | NC | NC |
| 1321 | 2270 | GTATTTTTCGTATTTCTTGC | 2 | 2 | NC | NC |
| 1322 | 2271 | AGTATTTTTCGTATTTCTTG | 2 | 2 | NC | NC |
| 1323 | 2292 | TATTGTGCAGAAGGATTTTT | 2 | 2 | NC | NC |
| 1324 | 2293 | ATATTGTGCAGAAGGATTTT | 2 | 2 | NC | NC |
| 1325 | 2294 | CATATTGTGCAGAAGGATTT | 2 | 2 | NC | NC |
| 1326 | 2295 | ACATATTGTGCAGAAGGATT | 2 | 2 | NC | NC |
| 1327 | 2306 | CTGATACTGTCACATATTGT | 2 | 2 | NC | NC |
| 1328 | 2307 | CCTGATACTGTCACATATTG | 2 | 2 | NC | NC |
| 1329 | 2308 | TCCTGATACTGTCACATATT | 2 | 2 | NC | NC |
| 1330 | 2309 | GTCCTGATACTGTCACATAT | 2 | 2 | NC | NC |
| 1331 | 2310 | TGTCCTGATACTGTCACATA | 2 | 2 | NC | NC |
| 1332 | 2311 | CTGTCCTGATACTGTCACAT | 1 | 2 | NC | NC |
| 1333 | 2312 | CCTGTCCTGATACTGTCACA | 1 | 2 | NC | NC |
| 1334 | 2313 | TCCTGTCCTGATACTGTCAC | 2 | 1 | NC | NC |
| 1335 | 2314 | CTCCTGTCCTGATACTGTCA | 2 | 2 | NC | NC |
| 1336 | 2315 | ACTCCTGTCCTGATACTGTC | 2 | 2 | NC | NC |
| 1337 | 2316 | AACTCCTGTCCTGATACTGT | 2 | 2 | NC | NC |
| 1338 | 2317 | AAACTCCTGTCCTGATACTG | 2 | 2 | NC | NC |
| 1339 | 2318 | TAAACTCCTGTCCTGATACT | 1 | 2 | NC | NC |
| 1340 | 2319 | ATAAACTCCTGTCCTGATAC | 2 | 2 | NC | NC |
| 1341 | 2320 | CATAAACTCCTGTCCTGATA | 2 | 3 | NC | NC |
| 1342 | 2321 | TCATAAACTCCTGTCCTGAT | 2 | 2 | NC | NC |
| 1343 | 2322 | ATCATAAACTCCTGTCCTGA | 1 | 1 | NC | NC |
| 1344 | 2323 | TATCATAAACTCCTGTCCTG | 1 | NC | NC | NC |
| 1345 | 2324 | CTATCATAAACTCCTGTCCT | 2 | NC | NC | NC |
| 1346 | 2325 | TCTATCATAAACTCCTGTCC | 1 | NC | NC | NC |
| 1347 | 2326 | TTCTATCATAAACTCCTGTC | 1 | NC | NC | NC |
| 1348 | 2327 | TTTCTATCATAAACTCCTGT | 2 | NC | NC | NC |
| 1349 | 2328 | ATTTCTATCATAAACTCCTG | 2 | NC | NC | NC |
| 1350 | 2329 | TATTTCTATCATAAACTCCT | 1 | NC | NC | NC |
| 1351 | 2330 | TTATTTCTATCATAAACTCC | 1 | NC | NC | NC |
| 1352 | 2337 | GAGTTCTTTATTTCTATCAT | 1 | NC | NC | NC |
| 1353 | 2338 | AGAGTTCTTTATTTCTATCA | 2 | NC | NC | NC |
| 1354 | 2339 | CAGAGTTCTTTATTTCTATC | 2 | NC | NC | NC |
| 1355 | 2340 | GCAGAGTTCTTTATTTCTAT | 2 | NC | NC | NC |
| 1356 | 2341 | AGCAGAGTTCTTTATTTCTA | 2 | NC | NC | NC |
| 1357 | 2342 | CAGCAGAGTTCTTTATTTCT | 1 | NC | NC | NC |
| 1358 | 2343 | ACAGCAGAGTTCTTTATTTC | 2 | 2 | NC | NC |
| 1359 | 2344 | TACAGCAGAGTTCTTTATTT | 2 | 2 | NC | NC |
| 1360 | 2345 | ATACAGCAGAGTTCTTTATT | 2 | 2 | NC | NC |
| 1361 | 2346 | GATACAGCAGAGTTCTTTAT | 2 | 2 | NC | NC |
| 1362 | 2347 | AGATACAGCAGAGTTCTTTA | 2 | 2 | NC | NC |
| 1363 | 2348 | AAGATACAGCAGAGTTCTTT | 2 | 2 | NC | NC |
| 1364 | 2349 | CAAGATACAGCAGAGTTCTT | 2 | 2 | NC | NC |
| 1365 | 2350 | ACAAGATACAGCAGAGTTCT | 2 | 2 | NC | NC |
| 1366 | 2351 | TACAAGATACAGCAGAGTTC | 2 | 2 | NC | NC |
| 1367 | 2352 | ATACAAGATACAGCAGAGTT | 1 | 1 | NC | NC |
| 1368 | 2353 | TATACAAGATACAGCAGAGT | 2 | 2 | NC | NC |
| 1369 | 2354 | GTATACAAGATACAGCAGAG | 2 | 2 | NC | NC |
| 1370 | 2355 | GGTATACAAGATACAGCAGA | 2 | 2 | NC | NC |
| 1371 | 2356 | TGGTATACAAGATACAGCAG | 2 | 2 | NC | NC |
| 1372 | 2357 | TTGGTATACAAGATACAGCA | 2 | 2 | NC | NC |
| 1373 | 2374 | AACCTTTACCCAATCAGTTG | 3 | 2 | NC | NC |
| 1374 | 2375 | CAACCTTTACCCAATCAGTT | 2 | 2 | NC | NC |
| 1375 | 2376 | CCAACCTTTACCCAATCAGT | 2 | 2 | NC | NC |
| 1376 | 2377 | TCCAACCTTTACCCAATCAG | 2 | 2 | NC | NC |
| 1377 | 2378 | TTCCAACCTTTACCCAATCA | 2 | 2 | NC | NC |
| 1378 | 2379 | CTTCCAACCTTTACCCAATC | 2 | 2 | NC | NC |
| 1379 | 2380 | GCTTCCAACCTTTACCCAAT | 2 | 2 | NC | NC |
| 1380 | 2381 | TGCTTCCAACCTTTACCCAA | 2 | 2 | NC | NC |
| 1381 | 2382 | GTGCTTCCAACCTTTACCCA | 2 | 2 | NC | NC |
| 1382 | 2383 | TGTGCTTCCAACCTTTACCC | 2 | 2 | NC | NC |
| 1383 | 2384 | TTGTGCTTCCAACCTTTACC | 2 | 2 | NC | NC |
| 1384 | 2385 | TTTGTGCTTCCAACCTTTAC | 1 | 1 | NC | NC |
| 1385 | 2386 | TTTTGTGCTTCCAACCTTTA | 1 | 2 | NC | NC |
| 1386 | 2387 | CTTTTGTGCTTCCAACCTTT | 2 | 2 | NC | NC |
| 1387 | 2388 | GCTTTTGTGCTTCCAACCTT | 1 | 2 | 2 | 2 |
| 1388 | 2410 | AGGAGAGTGAAAGCGGCTCA | 2 | NC | NC | NC |
| 1389 | 2411 | AAGGAGAGTGAAAGCGGCTC | 2 | NC | NC | NC |
| 1390 | 2412 | AAAGGAGAGTGAAAGCGGCT | 2 | NC | NC | NC |
| 1391 | 2413 | AAAAGGAGAGTGAAAGCGGC | 2 | NC | NC | NC |
| 1392 | 2414 | TAAAAGGAGAGTGAAAGCGG | 2 | NC | NC | NC |
| 1393 | 2415 | ATAAAAGGAGAGTGAAAGCG | 2 | NC | NC | NC |
| 1394 | 2416 | AATAAAAGGAGAGTGAAAGC | 2 | NC | NC | NC |
| 1395 | 2417 | CAATAAAAGGAGAGTGAAAG | 1 | NC | NC | NC |
| 1396 | 2418 | ACAATAAAAGGAGAGTGAAA | 1 | NC | NC | NC |
| 1397 | 2419 | TACAATAAAAGGAGAGTGAA | 1 | NC | NC | NC |
| 1398 | 2420 | CTACAATAAAAGGAGAGTGA | 1 | NC | NC | NC |
| 1399 | 2421 | TCTACAATAAAAGGAGAGTG | 1 | NC | NC | NC |
| 1400 | 2422 | TTCTACAATAAAAGGAGAGT | 1 | NC | NC | NC |
| 1401 | 2423 | TTTCTACAATAAAAGGAGAG | 1 | NC | NC | NC |
| 1402 | 2424 | TTTTCTACAATAAAAGGAGA | 1 | NC | NC | NC |
| 1403 | 2425 | ATTTTCTACAATAAAAGGAG | 2 | NC | NC | NC |
| 1404 | 2432 | GTCTGTAATTTTCTACAATA | 1 | NC | NC | NC |
| 1405 | 2433 | TGTCTGTAATTTTCTACAAT | 1 | NC | NC | NC |
| 1406 | 2434 | ATGTCTGTAATTTTCTACAA | 1 | 1 | NC | NC |
| 1407 | 2435 | GATGTCTGTAATTTTCTACA | 2 | 2 | NC | NC |
| 1408 | 2436 | AGATGTCTGTAATTTTCTAC | 2 | 2 | NC | NC |
| 1409 | 2448 | CGGAGCTGATTCAGATGTCT | 2 | NC | NC | NC |
| 1410 | 2449 | CCGGAGCTGATTCAGATGTC | 3 | NC | NC | NC |
| 1411 | 2450 | CCCGGAGCTGATTCAGATGT | 2 | NC | NC | NC |
| 1412 | 2451 | TCCCGGAGCTGATTCAGATG | 3 | NC | NC | NC |
| 1413 | 2452 | CTCCCGGAGCTGATTCAGAT | 2 | NC | NC | NC |
| 1414 | 2478 | TCAGCACTGCAGTCAAGGAC | 2 | 2 | NC | NC |
| 1415 | 2479 | TTCAGCACTGCAGTCAAGGA | 2 | 2 | NC | NC |
| 1416 | 2480 | ATTCAGCACTGCAGTCAAGG | 2 | 2 | NC | NC |
| 1417 | 2481 | CATTCAGCACTGCAGTCAAG | 2 | 2 | NC | NC |
| 1418 | 2482 | CCATTCAGCACTGCAGTCAA | 1 | 1 | NC | NC |
| 1419 | 2483 | GCCATTCAGCACTGCAGTCA | 2 | 2 | NC | NC |
| 1420 | 2484 | AGCCATTCAGCACTGCAGTC | 2 | 2 | NC | NC |
| 1421 | 2485 | AAGCCATTCAGCACTGCAGT | 1 | 1 | NC | NC |
| 1422 | 2486 | CAAGCCATTCAGCACTGCAG | 2 | 2 | NC | NC |
| 1423 | 2487 | TCAAGCCATTCAGCACTGCA | 1 | 2 | NC | NC |
| 1424 | 2488 | ATCAAGCCATTCAGCACTGC | 1 | 2 | NC | NC |
| 1425 | 2489 | AATCAAGCCATTCAGCACTG | 2 | 2 | NC | NC |
| 1426 | 2490 | AAATCAAGCCATTCAGCACT | 2 | 2 | NC | NC |
| 1427 | 2491 | AAAATCAAGCCATTCAGCAC | 2 | 2 | NC | NC |
| 1428 | 2492 | GAAAATCAAGCCATTCAGCA | 2 | 1 | NC | NC |
| 1429 | 2493 | AGAAAATCAAGCCATTCAGC | 2 | 2 | NC | NC |
| 1430 | 2494 | TAGAAAATCAAGCCATTCAG | 2 | 2 | NC | NC |
| 1431 | 2495 | CTAGAAAATCAAGCCATTCA | 2 | 2 | NC | NC |
| 1432 | 2496 | TCTAGAAAATCAAGCCATTC | 2 | 2 | NC | NC |
| 1433 | 2497 | CTCTAGAAAATCAAGCCATT | 2 | 2 | NC | NC |
| 1434 | 2498 | TCTCTAGAAAATCAAGCCAT | 2 | 2 | NC | NC |
| 1435 | 2499 | TTCTCTAGAAAATCAAGCCA | 2 | 2 | NC | NC |
| 1436 | 2509 | TTCACTGAATTTCTCTAGAA | 2 | 1 | NC | NC |
| 1437 | 2510 | GTTCACTGAATTTCTCTAGA | 2 | 2 | NC | NC |
| 1438 | 2511 | TGTTCACTGAATTTCTCTAG | 2 | 2 | NC | NC |
| 1439 | 2512 | ATGTTCACTGAATTTCTCTA | 2 | 2 | NC | NC |
| 1440 | 2513 | AATGTTCACTGAATTTCTCT | 1 | 1 | NC | NC |
| 1441 | 2514 | TAATGTTCACTGAATTTCTC | 2 | 2 | NC | NC |
| 1442 | 2515 | ATAATGTTCACTGAATTTCT | 2 | 2 | NC | NC |
| 1443 | 2516 | GATAATGTTCACTGAATTTC | 2 | 2 | NC | NC |
| 1444 | 2517 | TGATAATGTTCACTGAATTT | 2 | 2 | NC | NC |
| 1445 | 2525 | ACAAGGAGTGATAATGTTCA | 2 | NC | NC | NC |
| 1446 | 2538 | TGCACTGCTTTACACAAGGA | 2 | NC | NC | NC |
| 1447 | 2539 | ATGCACTGCTTTACACAAGG | 2 | NC | NC | NC |
| 1448 | 2540 | GATGCACTGCTTTACACAAG | 2 | 2 | NC | NC |
| 1449 | 2541 | TGATGCACTGCTTTACACAA | 2 | 2 | NC | NC |
| 1450 | 2542 | GTGATGCACTGCTTTACACA | 2 | 2 | NC | NC |
| 1451 | 2543 | GGTGATGCACTGCTTTACAC | 2 | 2 | NC | NC |
| 1452 | 2544 | AGGTGATGCACTGCTTTACA | 2 | 2 | NC | NC |
| 1453 | 2545 | TAGGTGATGCACTGCTTTAC | 2 | 2 | NC | NC |
| 1454 | 2546 | CTAGGTGATGCACTGCTTTA | 2 | 2 | NC | NC |
| 1455 | 2547 | GCTAGGTGATGCACTGCTTT | 2 | 2 | NC | NC |
| 1456 | 2548 | TGCTAGGTGATGCACTGCTT | 2 | 2 | NC | NC |
| 1457 | 2555 | CAACAGTTGCTAGGTGATGC | 2 | 2 | NC | NC |
| 1458 | 2556 | TCAACAGTTGCTAGGTGATG | 2 | 2 | NC | NC |
| 1459 | 2557 | GTCAACAGTTGCTAGGTGAT | 2 | 2 | 1 | NC |
| 1460 | 2558 | AGTCAACAGTTGCTAGGTGA | 2 | 2 | 1 | NC |
| 1461 | 2559 | CAGTCAACAGTTGCTAGGTG | 2 | 2 | 1 | NC |
| 1462 | 2560 | GCAGTCAACAGTTGCTAGGT | 2 | 2 | NC | NC |
| 1463 | 2566 | GAAAATGCAGTCAACAGTTG | 1 | 2 | NC | NC |
| 1464 | 2567 | AGAAAATGCAGTCAACAGTT | 2 | 1 | NC | NC |
| 1465 | 2568 | GAGAAAATGCAGTCAACAGT | 2 | 1 | NC | NC |
| 1466 | 2569 | GGAGAAAATGCAGTCAACAG | 2 | 1 | NC | NC |
| 1467 | 2570 | GGGAGAAAATGCAGTCAACA | 1 | 1 | NC | NC |
| 1468 | 2571 | AGGGAGAAAATGCAGTCAAC | 2 | 2 | NC | NC |
| 1469 | 2572 | CAGGGAGAAAATGCAGTCAA | 1 | 1 | NC | NC |
| 1470 | 2573 | CCAGGGAGAAAATGCAGTCA | 2 | 1 | NC | NC |
| 1471 | 2574 | GCCAGGGAGAAAATGCAGTC | 2 | 2 | NC | NC |
| 1472 | 2575 | GGCCAGGGAGAAAATGCAGT | 1 | 2 | NC | NC |
| 1473 | 2576 | TGGCCAGGGAGAAAATGCAG | 2 | 1 | NC | NC |
| 1474 | 2577 | TTGGCCAGGGAGAAAATGCA | 2 | 2 | NC | NC |
| 1475 | 2578 | CTTGGCCAGGGAGAAAATGC | 2 | 1 | NC | NC |
| 1476 | 2590 | TTGCTTAGCGACCTTGGCCA | 2 | 2 | NC | NC |
| 1477 | 2593 | TCCTTGCTTAGCGACCTTGG | 2 | 2 | NC | NC |
| 1478 | 2594 | CTCCTTGCTTAGCGACCTTG | 2 | NC | NC | NC |
| 1479 | 2595 | TCTCCTTGCTTAGCGACCTT | 2 | NC | NC | NC |
| 1480 | 2596 | ATCTCCTTGCTTAGCGACCT | 2 | NC | NC | NC |
| 1481 | 2597 | AATCTCCTTGCTTAGCGACC | 2 | NC | NC | NC |
| 1482 | 2598 | TAATCTCCTTGCTTAGCGAC | 3 | NC | NC | NC |
| 1483 | 2599 | GTAATCTCCTTGCTTAGCGA | 3 | NC | NC | NC |
| 1484 | 2600 | AGTAATCTCCTTGCTTAGCG | 2 | NC | NC | NC |
| 1485 | 2601 | CAGTAATCTCCTTGCTTAGC | 2 | NC | NC | NC |
| 1486 | 2602 | GCAGTAATCTCCTTGCTTAG | 1 | NC | NC | NC |
| 1487 | 2603 | TGCAGTAATCTCCTTGCTTA | 1 | NC | NC | NC |
| 1488 | 2604 | CTGCAGTAATCTCCTTGCTT | 1 | NC | NC | NC |
| 1489 | 2605 | TCTGCAGTAATCTCCTTGCT | 1 | NC | NC | NC |
| 1490 | 2607 | GGTCTGCAGTAATCTCCTTG | 2 | NC | NC | NC |
| 1491 | 2608 | TGGTCTGCAGTAATCTCCTT | 2 | NC | NC | NC |
| 1492 | 2609 | TTGGTCTGCAGTAATCTCCT | 2 | NC | NC | NC |
| 1493 | 2610 | GTTGGTCTGCAGTAATCTCC | 2 | NC | NC | NC |
| 1494 | 2611 | AGTTGGTCTGCAGTAATCTC | 2 | NC | NC | NC |
| 1495 | 2612 | CAGTTGGTCTGCAGTAATCT | 2 | NC | NC | NC |
| 1496 | 2622 | TCTTCTTGTACAGTTGGTCT | 2 | 2 | NC | NC |
| 1497 | 2623 | TTCTTCTTGTACAGTTGGTC | 2 | 2 | NC | NC |
| 1498 | 2624 | TTTCTTCTTGTACAGTTGGT | 2 | 2 | NC | NC |
| 1499 | 2625 | CTTTCTTCTTGTACAGTTGG | 2 | 2 | NC | NC |
| 1500 | 2626 | TCTTTCTTCTTGTACAGTTG | 2 | 2 | NC | NC |
| 1501 | 2627 | TTCTTTCTTCTTGTACAGTT | 2 | 1 | NC | NC |
| 1502 | 2628 | TTTCTTTCTTCTTGTACAGT | 1 | 1 | NC | NC |
| 1503 | 2629 | TTTTCTTTCTTCTTGTACAG | 1 | 1 | NC | NC |
| 1504 | 2630 | TTTTTCTTTCTTCTTGTACA | 1 | 1 | NC | NC |
| 1505 | 2631 | ATTTTTCTTTCTTCTTGTAC | 1 | 1 | NC | NC |
| 1506 | 2633 | CAATTTTTCTTTCTTCTTGT | 1 | NC | NC | NC |
| 1507 | 2634 | ACAATTTTTCTTTCTTCTTG | 1 | NC | NC | NC |
| 1508 | 2658 | ACAGGGTGCCTTCCATTTTT | 2 | NC | NC | NC |
| 1509 | 2659 | CACAGGGTGCCTTCCATTTT | 2 | NC | NC | NC |
| 1510 | 2660 | TCACAGGGTGCCTTCCATTT | 2 | NC | NC | NC |
| 1511 | 2661 | ATCACAGGGTGCCTTCCATT | 2 | NC | NC | NC |
| 1512 | 2662 | AATCACAGGGTGCCTTCCAT | 2 | NC | NC | NC |
| 1513 | 2663 | CAATCACAGGGTGCCTTCCA | 2 | NC | NC | NC |
| 1514 | 2664 | TCAATCACAGGGTGCCTTCC | 2 | NC | NC | NC |
| 1515 | 2665 | ATCAATCACAGGGTGCCTTC | 2 | NC | NC | NC |
| 1516 | 2666 | CATCAATCACAGGGTGCCTT | 2 | NC | NC | NC |
| 1517 | 2667 | ACATCAATCACAGGGTGCCT | 2 | NC | NC | NC |
| 1518 | 2668 | CACATCAATCACAGGGTGCC | 2 | NC | NC | NC |
| 1519 | 2669 | ACACATCAATCACAGGGTGC | 2 | NC | NC | NC |
| 1520 | 2670 | AACACATCAATCACAGGGTG | 2 | NC | NC | NC |
| 1521 | 2671 | CAACACATCAATCACAGGGT | 2 | NC | NC | NC |
| 1522 | 2672 | GCAACACATCAATCACAGGG | 2 | NC | NC | NC |
| 1523 | 2673 | AGCAACACATCAATCACAGG | 2 | 2 | NC | NC |
| 1524 | 2674 | CAGCAACACATCAATCACAG | 1 | 1 | NC | NC |
| 1525 | 2675 | CCAGCAACACATCAATCACA | 2 | 2 | NC | NC |
| 1526 | 2676 | CCCAGCAACACATCAATCAC | 2 | 2 | NC | NC |
| 1527 | 2677 | TCCCAGCAACACATCAATCA | 2 | 2 | NC | NC |
| 1528 | 2678 | CTCCCAGCAACACATCAATC | 1 | 1 | NC | NC |
| 1529 | 2679 | TCTCCCAGCAACACATCAAT | 2 | 2 | NC | NC |
| 1530 | 2680 | TTCTCCCAGCAACACATCAA | 2 | 2 | NC | NC |
| 1531 | 2681 | GTTCTCCCAGCAACACATCA | 2 | 1 | NC | NC |
| 1532 | 2682 | TGTTCTCCCAGCAACACATC | 2 | 2 | NC | NC |
| 1533 | 2683 | CTGTTCTCCCAGCAACACAT | 2 | 1 | NC | NC |
| 1534 | 2684 | CCTGTTCTCCCAGCAACACA | 2 | 0 | NC | NC |
| 1535 | 2685 | TCCTGTTCTCCCAGCAACAC | 2 | 1 | NC | NC |
| 1536 | 2686 | ATCCTGTTCTCCCAGCAACA | 2 | 1 | NC | NC |
| 1537 | 2687 | GATCCTGTTCTCCCAGCAAC | 2 | 1 | NC | NC |
| 1538 | 2688 | TGATCCTGTTCTCCCAGCAA | 2 | 2 | NC | NC |
| 1539 | 2689 | TTGATCCTGTTCTCCCAGCA | 2 | 2 | NC | NC |
| 1540 | 2690 | ATTGATCCTGTTCTCCCAGC | 2 | 2 | NC | NC |
| 1541 | 2691 | TATTGATCCTGTTCTCCCAG | 2 | 2 | NC | NC |
| 1542 | 2692 | ATATTGATCCTGTTCTCCCA | 2 | 2 | NC | NC |
| 1543 | 2693 | CATATTGATCCTGTTCTCCC | 2 | 2 | NC | NC |
| 1544 | 2694 | ACATATTGATCCTGTTCTCC | 2 | 2 | NC | NC |
| 1545 | 2695 | GACATATTGATCCTGTTCTC | 2 | NC | NC | NC |
| 1546 | 2696 | GGACATATTGATCCTGTTCT | 2 | NC | NC | NC |
| 1547 | 2697 | GGGACATATTGATCCTGTTC | 2 | NC | NC | NC |
| 1548 | 2698 | TGGGACATATTGATCCTGTT | 2 | NC | NC | NC |
| 1549 | 2711 | AATCTGTATTATTTGGGACA | 1 | NC | NC | NC |
| 1550 | 2712 | AAATCTGTATTATTTGGGAC | 2 | NC | NC | NC |
| 1551 | 2713 | TAAATCTGTATTATTTGGGA | 2 | NC | NC | NC |
| 1552 | 2714 | ATAAATCTGTATTATTTGGG | 1 | NC | NC | NC |
| 1553 | 2715 | GATAAATCTGTATTATTTGG | 2 | NC | NC | NC |
| 1554 | 2719 | CTCTGATAAATCTGTATTAT | 2 | NC | NC | NC |
| 1555 | 2720 | CCTCTGATAAATCTGTATTA | 2 | NC | NC | NC |
| 1556 | 2721 | TCCTCTGATAAATCTGTATT | 1 | NC | NC | NC |
| 1557 | 2722 | GTCCTCTGATAAATCTGTAT | 2 | NC | NC | NC |
| 1558 | 2723 | AGTCCTCTGATAAATCTGTA | 2 | 1 | NC | NC |
| 1559 | 2724 | GAGTCCTCTGATAAATCTGT | 2 | 2 | NC | NC |
| 1560 | 2725 | TGAGTCCTCTGATAAATCTG | 1 | 1 | NC | NC |
| 1561 | 2726 | CTGAGTCCTCTGATAAATCT | 1 | 1 | NC | NC |
| 1562 | 2727 | TCTGAGTCCTCTGATAAATC | 2 | 2 | NC | NC |
| 1563 | 2728 | CTCTGAGTCCTCTGATAAAT | 2 | 2 | NC | NC |
| 1564 | 2729 | TCTCTGAGTCCTCTGATAAA | 1 | 2 | NC | NC |
| 1565 | 2730 | CTCTCTGAGTCCTCTGATAA | 2 | 2 | NC | NC |
| 1566 | 2731 | TCTCTCTGAGTCCTCTGATA | 2 | 2 | NC | NC |
| 1567 | 2732 | CTCTCTCTGAGTCCTCTGAT | 2 | 1 | NC | NC |
| 1568 | 2742 | ATTATCATTACTCTCTCTGA | 2 | 2 | NC | NC |
| 1569 | 2743 | AATTATCATTACTCTCTCTG | 2 | 2 | NC | NC |
| 1570 | 2744 | TAATTATCATTACTCTCTCT | 2 | 1 | NC | NC |
| 1571 | 2752 | TGGTCCGGTAATTATCATTA | 3 | NC | NC | NC |
| 1572 | 2753 | TTGGTCCGGTAATTATCATT | 3 | NC | NC | NC |
| 1573 | 2754 | TTTGGTCCGGTAATTATCAT | 2 | NC | NC | NC |
| 1574 | 2755 | GTTTGGTCCGGTAATTATCA | 3 | NC | NC | NC |
| 1575 | 2756 | TGTTTGGTCCGGTAATTATC | 3 | NC | NC | NC |
| 1576 | 2757 | ATGTTTGGTCCGGTAATTAT | 3 | NC | NC | NC |
| 1577 | 2758 | CATGTTTGGTCCGGTAATTA | 2 | NC | NC | NC |
| 1578 | 2759 | CCATGTTTGGTCCGGTAATT | 3 | NC | NC | NC |
| 1579 | 2770 | GCTCTTTCCACCCATGTTTG | 2 | 2 | NC | NC |
| 1580 | 2771 | AGCTCTTTCCACCCATGTTT | 1 | 2 | NC | NC |
| 1581 | 2772 | GAGCTCTTTCCACCCATGTT | 2 | 2 | NC | NC |
| 1582 | 2773 | GGAGCTCTTTCCACCCATGT | 2 | 2 | NC | NC |
| 1583 | 2782 | TTTTATGTAGGAGCTCTTTC | 2 | 2 | NC | NC |
| 1584 | 2783 | GTTTTATGTAGGAGCTCTTT | 2 | 2 | NC | NC |
| 1585 | 2784 | TGTTTTATGTAGGAGCTCTT | 2 | 2 | NC | NC |
| 1586 | 2785 | TTGTTTTATGTAGGAGCTCT | 2 | 2 | NC | NC |
| 1587 | 2786 | CTTGTTTTATGTAGGAGCTC | 3 | 3 | NC | NC |
| 1588 | 2787 | ACTTGTTTTATGTAGGAGCT | 2 | 2 | NC | NC |
| 1589 | 2788 | AACTTGTTTTATGTAGGAGC | 2 | 2 | NC | NC |
| 1590 | 2789 | CAACTTGTTTTATGTAGGAG | 2 | 2 | NC | NC |
| 1591 | 2790 | GCAACTTGTTTTATGTAGGA | 2 | 2 | NC | NC |
| 1592 | 2791 | TGCAACTTGTTTTATGTAGG | 2 | 3 | NC | NC |
| 1593 | 2792 | ATGCAACTTGTTTTATGTAG | 2 | 2 | NC | NC |
| 1594 | 2793 | AATGCAACTTGTTTTATGTA | 2 | 2 | NC | NC |
| 1595 | 2794 | CAATGCAACTTGTTTTATGT | 2 | 2 | NC | NC |
| 1596 | 2795 | TCAATGCAACTTGTTTTATG | 2 | 2 | NC | NC |
| 1597 | 2796 | ATCAATGCAACTTGTTTTAT | 2 | 2 | NC | NC |
| 1598 | 2797 | AATCAATGCAACTTGTTTTA | 1 | 2 | NC | NC |
| 1599 | 2798 | TAATCAATGCAACTTGTTTT | 1 | 1 | NC | NC |
| 1600 | 2799 | GTAATCAATGCAACTTGTTT | 2 | 2 | NC | NC |
| 1601 | 2800 | GGTAATCAATGCAACTTGTT | 2 | 2 | NC | NC |
| 1602 | 2801 | TGGTAATCAATGCAACTTGT | 2 | 2 | NC | NC |
| 1603 | 2802 | ATGGTAATCAATGCAACTTG | 2 | 2 | NC | NC |
| 1604 | 2803 | GATGGTAATCAATGCAACTT | 2 | 2 | NC | NC |
| 1605 | 2804 | TGATGGTAATCAATGCAACT | 2 | 2 | NC | NC |
| 1606 | 2819 | AGCCAATCTGAGCCATGATG | 2 | 2 | 2 | NC |
| 1607 | 2820 | GAGCCAATCTGAGCCATGAT | 2 | 2 | 2 | NC |
| 1608 | 2821 | GGAGCCAATCTGAGCCATGA | 2 | 2 | 2 | NC |
| 1609 | 2822 | AGGAGCCAATCTGAGCCATG | 2 | 2 | 2 | NC |
| 1610 | 2823 | TAGGAGCCAATCTGAGCCAT | 2 | 2 | 2 | NC |
| 1611 | 2824 | ATAGGAGCCAATCTGAGCCA | 2 | 2 | NC | NC |
| 1612 | 2825 | CATAGGAGCCAATCTGAGCC | 3 | 2 | NC | NC |
| 1613 | 2826 | ACATAGGAGCCAATCTGAGC | 2 | 2 | NC | NC |
| 1614 | 2827 | AACATAGGAGCCAATCTGAG | 2 | 2 | NC | NC |
| 1615 | 2828 | GAACATAGGAGCCAATCTGA | 2 | 2 | NC | NC |
| 1616 | 2829 | GGAACATAGGAGCCAATCTG | 1 | 2 | NC | NC |
| 1617 | 2830 | AGGAACATAGGAGCCAATCT | 1 | 2 | NC | NC |
| 1618 | 2831 | CAGGAACATAGGAGCCAATC | 2 | 2 | NC | NC |
| 1619 | 2832 | GCAGGAACATAGGAGCCAAT | 2 | 2 | NC | NC |
| 1620 | 2833 | TGCAGGAACATAGGAGCCAA | 2 | 2 | NC | NC |
| 1621 | 2834 | CTGCAGGAACATAGGAGCCA | 2 | 2 | NC | NC |
| 1622 | 2835 | TCTGCAGGAACATAGGAGCC | 2 | 2 | NC | NC |
| 1623 | 2836 | TTCTGCAGGAACATAGGAGC | 2 | 2 | NC | NC |
| 1624 | 2837 | CTTCTGCAGGAACATAGGAG | 2 | 2 | NC | NC |
| 1625 | 2838 | TCTTCTGCAGGAACATAGGA | 2 | 2 | NC | NC |
| 1626 | 2839 | TTCTTCTGCAGGAACATAGG | 2 | 2 | NC | NC |
| 1627 | 2840 | CTTCTTCTGCAGGAACATAG | 2 | 2 | NC | NC |
| 1628 | 2841 | GCTTCTTCTGCAGGAACATA | 2 | 2 | NC | NC |
| 1629 | 2842 | CGCTTCTTCTGCAGGAACAT | 2 | 2 | NC | NC |
| 1630 | 2843 | TCGCTTCTTCTGCAGGAACA | 1 | 2 | NC | NC |
| 1631 | 2844 | GTCGCTTCTTCTGCAGGAAC | 2 | 2 | NC | NC |
| 1632 | 2845 | TGTCGCTTCTTCTGCAGGAA | 2 | 2 | NC | NC |
| 1633 | 2846 | TTGTCGCTTCTTCTGCAGGA | 2 | 2 | NC | NC |
| 1634 | 2847 | ATTGTCGCTTCTTCTGCAGG | 2 | 2 | NC | NC |
| 1635 | 2848 | AATTGTCGCTTCTTCTGCAG | 2 | 2 | NC | NC |
| 1636 | 2849 | CAATTGTCGCTTCTTCTGCA | 2 | 2 | NC | NC |
| 1637 | 2850 | CCAATTGTCGCTTCTTCTGC | 2 | 3 | NC | NC |
| 1638 | 2851 | CCCAATTGTCGCTTCTTCTG | 2 | 2 | NC | NC |
| 1639 | 2852 | TCCCAATTGTCGCTTCTTCT | 2 | 2 | NC | NC |
| 1640 | 2853 | ATCCCAATTGTCGCTTCTTC | 2 | 3 | NC | NC |
| 1641 | 2854 | AATCCCAATTGTCGCTTCTT | 1 | 2 | NC | NC |
| 1642 | 2855 | CAATCCCAATTGTCGCTTCT | 2 | 3 | NC | NC |
| 1643 | 2864 | TGCCATCCACAATCCCAATT | 2 | 2 | 2 | NC |
| 1644 | 2865 | ATGCCATCCACAATCCCAAT | 2 | 2 | 2 | NC |
| 1645 | 2866 | AATGCCATCCACAATCCCAA | 1 | 1 | 2 | NC |
| 1646 | 2867 | AAATGCCATCCACAATCCCA | 1 | 1 | 2 | NC |
| 1647 | 2868 | AAAATGCCATCCACAATCCC | 2 | 2 | 2 | NC |
| 1648 | 2869 | GAAAATGCCATCCACAATCC | 2 | 2 | 1 | NC |
| 1649 | 2870 | TGAAAATGCCATCCACAATC | 2 | 2 | 1 | NC |
| 1650 | 2871 | GTGAAAATGCCATCCACAAT | 2 | 2 | 2 | NC |
| 1651 | 2872 | TGTGAAAATGCCATCCACAA | 1 | 1 | 2 | NC |
| 1652 | 2873 | TTGTGAAAATGCCATCCACA | 1 | 1 | 2 | NC |
| 1653 | 2874 | CTTGTGAAAATGCCATCCAC | 1 | 1 | 2 | NC |
| 1654 | 2875 | CCTTGTGAAAATGCCATCCA | 1 | 1 | 2 | NC |
| 1655 | 2876 | TCCTTGTGAAAATGCCATCC | 2 | 2 | 2 | NC |
| 1656 | 2877 | ATCCTTGTGAAAATGCCATC | 2 | 2 | 1 | NC |
| 1657 | 2878 | CATCCTTGTGAAAATGCCAT | 2 | 2 | 2 | NC |
| 1658 | 2879 | CCATCCTTGTGAAAATGCCA | 2 | 2 | 2 | NC |
| 1659 | 2880 | CCCATCCTTGTGAAAATGCC | 2 | 2 | 2 | NC |
| 1660 | 2881 | ACCCATCCTTGTGAAAATGC | 2 | 1 | 2 | NC |
| 1661 | 2882 | CACCCATCCTTGTGAAAATG | 2 | 2 | 2 | NC |
| 1662 | 2883 | GCACCCATCCTTGTGAAAAT | 1 | 2 | 2 | NC |
| 1663 | 2884 | AGCACCCATCCTTGTGAAAA | 2 | 2 | 2 | NC |
| 1664 | 2885 | CAGCACCCATCCTTGTGAAA | 1 | 2 | 2 | NC |
| 1665 | 2886 | GCAGCACCCATCCTTGTGAA | 1 | 2 | 1 | NC |
| 1666 | 2887 | TGCAGCACCCATCCTTGTGA | 1 | 2 | 1 | NC |
| 1667 | 2889 | TCTGCAGCACCCATCCTTGT | 1 | 2 | 2 | NC |
| 1668 | 2891 | TGTCTGCAGCACCCATCCTT | 2 | 2 | 2 | NC |
| 1669 | 2892 | TTGTCTGCAGCACCCATCCT | 2 | 2 | 2 | NC |
| 1670 | 2893 | ATTGTCTGCAGCACCCATCC | 2 | 1 | 1 | NC |
| 1671 | 2894 | TATTGTCTGCAGCACCCATC | 2 | 2 | 2 | NC |
| 1672 | 2895 | ATATTGTCTGCAGCACCCAT | 2 | 2 | 2 | NC |
| 1673 | 2896 | TATATTGTCTGCAGCACCCA | 2 | 3 | 2 | NC |
| 1674 | 2897 | ATATATTGTCTGCAGCACCC | 2 | 2 | 2 | 2 |
| 1675 | 2898 | TATATATTGTCTGCAGCACC | 2 | 3 | 2 | 2 |
| 1676 | 2899 | ATATATATTGTCTGCAGCAC | 2 | 2 | NC | NC |
| 1677 | 2900 | TATATATATTGTCTGCAGCA | 2 | 2 | NC | NC |
| 1678 | 2901 | TTATATATATTGTCTGCAGC | 2 | 2 | NC | NC |
| 1679 | 2902 | TTTATATATATTGTCTGCAG | 2 | 2 | NC | NC |
| 1680 | 2903 | CTTTATATATATTGTCTGCA | 2 | 1 | NC | NC |
| 1681 | 2904 | CCTTTATATATATTGTCTGC | 2 | 2 | NC | NC |
| 1682 | 2905 | TCCTTTATATATATTGTCTG | 1 | 1 | NC | NC |
| 1683 | 2906 | GTCCTTTATATATATTGTCT | 2 | 1 | NC | NC |
| 1684 | 2907 | TGTCCTTTATATATATTGTC | 2 | NC | NC | NC |
| 1685 | 2908 | CTGTCCTTTATATATATTGT | 2 | NC | NC | NC |
| 1686 | 2909 | TCTGTCCTTTATATATATTG | 2 | NC | NC | NC |
| 1687 | 2910 | CTCTGTCCTTTATATATATT | 1 | NC | NC | NC |
| 1688 | 2911 | ACTCTGTCCTTTATATATAT | 2 | NC | NC | NC |
| 1689 | 2912 | TACTCTGTCCTTTATATATA | 2 | NC | NC | NC |
| 1690 | 2913 | GTACTCTGTCCTTTATATAT | 2 | NC | NC | NC |
| 1691 | 2914 | TGTACTCTGTCCTTTATATA | 2 | NC | NC | NC |
| 1692 | 2915 | ATGTACTCTGTCCTTTATAT | 2 | NC | NC | NC |
| 1693 | 2916 | AATGTACTCTGTCCTTTATA | 2 | NC | NC | NC |
| 1694 | 2917 | AAATGTACTCTGTCCTTTAT | 2 | NC | NC | NC |
| 1695 | 2918 | TAAATGTACTCTGTCCTTTA | 1 | NC | NC | NC |
| 1696 | 2919 | ATAAATGTACTCTGTCCTTT | 1 | NC | NC | NC |
| 1697 | 2920 | CATAAATGTACTCTGTCCTT | 2 | NC | NC | NC |
| 1698 | 2921 | CCATAAATGTACTCTGTCCT | 2 | NC | NC | NC |
| 1699 | 2922 | TCCATAAATGTACTCTGTCC | 2 | NC | NC | NC |
| 1700 | 2923 | TTCCATAAATGTACTCTGTC | 2 | NC | NC | NC |
| 1701 | 2924 | CTTCCATAAATGTACTCTGT | 2 | NC | NC | NC |
| 1702 | 2925 | TCTTCCATAAATGTACTCTG | 1 | NC | NC | NC |
| 1703 | 2926 | TTCTTCCATAAATGTACTCT | 0 | NC | NC | NC |
| 1704 | 2927 | GTTCTTCCATAAATGTACTC | 1 | 2 | NC | NC |
| 1705 | 2928 | AGTTCTTCCATAAATGTACT | 1 | 2 | NC | NC |
| 1706 | 2929 | CAGTTCTTCCATAAATGTAC | 1 | 2 | NC | NC |
| 1707 | 2930 | TCAGTTCTTCCATAAATGTA | 1 | 2 | NC | NC |
| 1708 | 2931 | GTCAGTTCTTCCATAAATGT | 1 | 1 | NC | NC |
| 1709 | 2932 | AGTCAGTTCTTCCATAAATG | 2 | 1 | NC | NC |
| 1710 | 2933 | CAGTCAGTTCTTCCATAAAT | 1 | 2 | NC | NC |
| 1711 | 2934 | TCAGTCAGTTCTTCCATAAA | 2 | 1 | NC | NC |
| 1712 | 2935 | GTCAGTCAGTTCTTCCATAA | 2 | 1 | NC | NC |
| 1713 | 2936 | TGTCAGTCAGTTCTTCCATA | 2 | 2 | NC | NC |
| 1714 | 2937 | GTGTCAGTCAGTTCTTCCAT | 2 | 2 | NC | NC |
| 1715 | 2938 | TGTGTCAGTCAGTTCTTCCA | 2 | 1 | NC | NC |
| 1716 | 2939 | CTGTGTCAGTCAGTTCTTCC | 2 | 2 | NC | NC |
| 1717 | 2940 | GCTGTGTCAGTCAGTTCTTC | 2 | 2 | NC | NC |
| 1718 | 2941 | TGCTGTGTCAGTCAGTTCTT | 2 | 2 | NC | NC |
| 1719 | 2942 | CTGCTGTGTCAGTCAGTTCT | 2 | 2 | NC | NC |
| 1720 | 2943 | TCTGCTGTGTCAGTCAGTTC | 2 | 2 | NC | NC |
| 1721 | 2944 | TTCTGCTGTGTCAGTCAGTT | 2 | 2 | NC | NC |
| 1722 | 2945 | TTTCTGCTGTGTCAGTCAGT | 2 | 2 | NC | NC |
| 1723 | 2946 | ATTTCTGCTGTGTCAGTCAG | 2 | 1 | NC | NC |
| 1724 | 2947 | TATTTCTGCTGTGTCAGTCA | 2 | 2 | NC | NC |
| 1725 | 2948 | TTATTTCTGCTGTGTCAGTC | 2 | 1 | NC | NC |
| 1726 | 2949 | ATTATTTCTGCTGTGTCAGT | 1 | 1 | NC | NC |
| 1727 | 2950 | GATTATTTCTGCTGTGTCAG | 2 | 2 | NC | NC |
| 1728 | 2951 | TGATTATTTCTGCTGTGTCA | 2 | 2 | NC | NC |
| 1729 | 2952 | CTGATTATTTCTGCTGTGTC | 2 | 2 | NC | NC |
| 1730 | 2953 | TCTGATTATTTCTGCTGTGT | 2 | 2 | NC | NC |
| 1731 | 2954 | TTCTGATTATTTCTGCTGTG | 2 | 2 | NC | NC |
| 1732 | 2955 | TTTCTGATTATTTCTGCTGT | 1 | 2 | NC | NC |
| 1733 | 2956 | TTTTCTGATTATTTCTGCTG | 1 | 2 | NC | NC |
| 1734 | 2957 | CTTTTCTGATTATTTCTGCT | 1 | 1 | NC | NC |
| 1735 | 2958 | GCTTTTCTGATTATTTCTGC | 1 | 1 | NC | NC |
| 1736 | 2959 | TGCTTTTCTGATTATTTCTG | 1 | 1 | NC | NC |
| 1737 | 2960 | TTGCTTTTCTGATTATTTCT | 1 | 1 | NC | NC |
| 1738 | 2961 | GTTGCTTTTCTGATTATTTC | 2 | 1 | NC | NC |
| 1739 | 2962 | TGTTGCTTTTCTGATTATTT | 1 | 1 | NC | NC |
| 1740 | 2963 | ATGTTGCTTTTCTGATTATT | 2 | 2 | NC | NC |
| 1741 | 2964 | GATGTTGCTTTTCTGATTAT | 2 | 2 | NC | NC |
| 1742 | 2965 | TGATGTTGCTTTTCTGATTA | 1 | 1 | NC | NC |
| 1743 | 2966 | GTGATGTTGCTTTTCTGATT | 1 | 1 | NC | NC |
| 1744 | 2967 | TGTGATGTTGCTTTTCTGAT | 1 | 1 | NC | NC |
| 1745 | 2968 | CTGTGATGTTGCTTTTCTGA | 2 | 2 | NC | NC |
| 1746 | 2969 | ACTGTGATGTTGCTTTTCTG | 2 | 2 | NC | NC |
| 1747 | 2970 | GACTGTGATGTTGCTTTTCT | 2 | 2 | NC | NC |
| 1748 | 2971 | GGACTGTGATGTTGCTTTTC | 1 | 2 | NC | NC |
| 1749 | 2972 | AGGACTGTGATGTTGCTTTT | 1 | 2 | NC | NC |
| 1750 | 2973 | AAGGACTGTGATGTTGCTTT | 1 | 2 | NC | NC |
| 1751 | 2974 | CAAGGACTGTGATGTTGCTT | 2 | 2 | NC | NC |
| 1752 | 2975 | CCAAGGACTGTGATGTTGCT | 2 | 2 | NC | NC |
| 1753 | 2976 | ACCAAGGACTGTGATGTTGC | 2 | 2 | NC | NC |
| 1754 | 2977 | AACCAAGGACTGTGATGTTG | 2 | 2 | NC | NC |
| 1755 | 2978 | TAACCAAGGACTGTGATGTT | 2 | 2 | NC | NC |
| 1756 | 2979 | ATAACCAAGGACTGTGATGT | 2 | 2 | NC | NC |
| 1757 | 2980 | GATAACCAAGGACTGTGATG | 3 | 3 | NC | NC |
| 1758 | 2981 | AGATAACCAAGGACTGTGAT | 2 | 2 | NC | NC |
| 1759 | 2982 | AAGATAACCAAGGACTGTGA | 1 | 1 | NC | NC |
| 1760 | 2983 | CAAGATAACCAAGGACTGTG | 1 | 1 | NC | NC |
| 1761 | 2984 | CCAAGATAACCAAGGACTGT | 1 | 2 | NC | NC |
| 1762 | 2985 | TCCAAGATAACCAAGGACTG | 2 | 2 | NC | NC |
| 1763 | 2986 | ATCCAAGATAACCAAGGACT | 2 | 2 | NC | NC |
| 1764 | 2987 | CATCCAAGATAACCAAGGAC | 2 | 2 | NC | NC |
| 1765 | 2988 | TCATCCAAGATAACCAAGGA | 2 | 2 | NC | NC |
| 1766 | 2989 | TTCATCCAAGATAACCAAGG | 2 | 2 | NC | NC |
| 1767 | 2990 | GTTCATCCAAGATAACCAAG | 2 | NC | NC | NC |
| 1768 | 2991 | AGTTCATCCAAGATAACCAA | 2 | NC | NC | NC |
| 1769 | 2992 | TAGTTCATCCAAGATAACCA | 2 | NC | NC | NC |
| 1770 | 2993 | CTAGTTCATCCAAGATAACC | 2 | NC | NC | NC |
| 1771 | 2994 | CCTAGTTCATCCAAGATAAC | 2 | NC | NC | NC |
| 1772 | 2995 | TCCTAGTTCATCCAAGATAA | 2 | NC | NC | NC |
| 1773 | 2996 | TTCCTAGTTCATCCAAGATA | 2 | NC | NC | NC |
| 1774 | 2997 | CTTCCTAGTTCATCCAAGAT | 2 | NC | NC | NC |
| 1775 | 2998 | TCTTCCTAGTTCATCCAAGA | 2 | NC | NC | NC |
| 1776 | 2999 | CTCTTCCTAGTTCATCCAAG | 2 | NC | NC | NC |
| 1777 | 3000 | CCTCTTCCTAGTTCATCCAA | 2 | NC | NC | NC |
| 1778 | 3001 | CCCTCTTCCTAGTTCATCCA | 2 | NC | NC | NC |
| 1779 | 3002 | TCCCTCTTCCTAGTTCATCC | 2 | NC | NC | NC |
| 1780 | 3003 | GTCCCTCTTCCTAGTTCATC | 3 | NC | NC | NC |
| 1781 | 3004 | CGTCCCTCTTCCTAGTTCAT | 2 | NC | NC | NC |
| 1782 | 3005 | TCGTCCCTCTTCCTAGTTCA | 2 | NC | NC | NC |
| 1783 | 3006 | CTCGTCCCTCTTCCTAGTTC | 2 | NC | NC | NC |
| 1784 | 3007 | GCTCGTCCCTCTTCCTAGTT | 2 | NC | NC | NC |
| 1785 | 3008 | TGCTCGTCCCTCTTCCTAGT | 2 | NC | NC | NC |
| 1786 | 3010 | AGTGCTCGTCCCTCTTCCTA | 2 | NC | NC | NC |
| 1787 | 3013 | ATGAGTGCTCGTCCCTCTTC | 2 | NC | NC | NC |
| 1788 | 3014 | CATGAGTGCTCGTCCCTCTT | 2 | NC | NC | NC |
| 1789 | 3015 | TCATGAGTGCTCGTCCCTCT | 2 | NC | NC | NC |
| 1790 | 3016 | ATCATGAGTGCTCGTCCCTC | 2 | NC | NC | NC |
| 1791 | 3017 | CATCATGAGTGCTCGTCCCT | 2 | NC | NC | NC |
| 1792 | 3019 | TCCATCATGAGTGCTCGTCC | 2 | NC | NC | NC |
| 1793 | 3020 | TTCCATCATGAGTGCTCGTC | 3 | NC | NC | NC |
| 1794 | 3021 | ATTCCATCATGAGTGCTCGT | 2 | NC | NC | NC |
| 1795 | 3022 | AATTCCATCATGAGTGCTCG | 2 | NC | NC | NC |
| 1796 | 3023 | CAATTCCATCATGAGTGCTC | 2 | NC | NC | NC |
| 1797 | 3024 | GCAATTCCATCATGAGTGCT | 2 | NC | NC | NC |
| 1798 | 3025 | GGCAATTCCATCATGAGTGC | 2 | NC | NC | NC |
| 1799 | 3049 | ATACTCAAGTGTAGCATAGG | 3 | 3 | NC | NC |
| 1800 | 3050 | AATACTCAAGTGTAGCATAG | 2 | 2 | NC | NC |
| 1801 | 3051 | AAATACTCAAGTGTAGCATA | 2 | 2 | NC | NC |
| 1802 | 3052 | GAAATACTCAAGTGTAGCAT | 1 | 1 | NC | NC |
| 1803 | 3053 | TGAAATACTCAAGTGTAGCA | 1 | 1 | NC | NC |
| 1804 | 3054 | ATGAAATACTCAAGTGTAGC | 1 | 1 | NC | NC |
| 1805 | 3055 | GATGAAATACTCAAGTGTAG | 1 | 2 | NC | NC |
| 1806 | 3056 | TGATGAAATACTCAAGTGTA | 2 | 2 | NC | NC |
| 1807 | 3057 | CTGATGAAATACTCAAGTGT | 1 | 2 | NC | NC |
| 1808 | 3058 | TCTGATGAAATACTCAAGTG | 1 | 2 | NC | NC |
| 1809 | 3059 | CTCTGATGAAATACTCAAGT | 1 | 2 | NC | NC |
| 1810 | 3060 | TCTCTGATGAAATACTCAAG | 1 | 2 | NC | NC |
| 1811 | 3061 | ATCTCTGATGAAATACTCAA | 2 | 2 | NC | NC |
| 1812 | 3063 | ACATCTCTGATGAAATACTC | 2 | 2 | NC | NC |
| 1813 | 3064 | CACATCTCTGATGAAATACT | 2 | 2 | NC | NC |
| 1814 | 3065 | TCACATCTCTGATGAAATAC | 2 | 1 | NC | NC |
| 1815 | 3066 | TTCACATCTCTGATGAAATA | 1 | 1 | NC | NC |
| 1816 | 3067 | TTTCACATCTCTGATGAAAT | 1 | 1 | NC | NC |
| 1817 | 3069 | GATTTCACATCTCTGATGAA | 1 | 2 | NC | NC |
| 1818 | 3070 | GGATTTCACATCTCTGATGA | 2 | 2 | NC | NC |
| 1819 | 3071 | AGGATTTCACATCTCTGATG | 2 | 2 | NC | NC |
| 1820 | 3072 | AAGGATTTCACATCTCTGAT | 2 | 2 | NC | NC |
| 1821 | 3073 | TAAGGATTTCACATCTCTGA | 2 | 2 | NC | NC |
| 1822 | 3074 | TTAAGGATTTCACATCTCTG | 2 | 2 | NC | NC |
| 1823 | 3075 | GTTAAGGATTTCACATCTCT | 2 | 2 | NC | NC |
| 1824 | 3076 | GGTTAAGGATTTCACATCTC | 2 | 2 | NC | NC |
| 1825 | 3077 | GGGTTAAGGATTTCACATCT | 2 | 2 | NC | NC |
| 1826 | 3078 | AGGGTTAAGGATTTCACATC | 2 | 2 | NC | NC |
| 1827 | 3079 | CAGGGTTAAGGATTTCACAT | 2 | 2 | NC | NC |
| 1828 | 3080 | ACAGGGTTAAGGATTTCACA | 2 | 2 | NC | NC |
| 1829 | 3081 | AACAGGGTTAAGGATTTCAC | 2 | 2 | NC | NC |
| 1830 | 3082 | AAACAGGGTTAAGGATTTCA | 2 | 2 | NC | NC |
| 1831 | 3083 | CAAACAGGGTTAAGGATTTC | 2 | 2 | NC | NC |
| 1832 | 3084 | ACAAACAGGGTTAAGGATTT | 1 | 2 | NC | NC |
| 1833 | 3085 | GACAAACAGGGTTAAGGATT | 2 | 2 | NC | NC |
| 1834 | 3086 | TGACAAACAGGGTTAAGGAT | 1 | 1 | NC | NC |
| 1835 | 3087 | GTGACAAACAGGGTTAAGGA | 1 | 2 | NC | NC |
| 1836 | 3088 | GGTGACAAACAGGGTTAAGG | 1 | 2 | NC | NC |
| 1837 | 3089 | GGGTGACAAACAGGGTTAAG | 1 | 2 | NC | NC |
| 1838 | 3090 | TGGGTGACAAACAGGGTTAA | 1 | 2 | NC | NC |
| 1839 | 3091 | ATGGGTGACAAACAGGGTTA | 2 | 2 | NC | NC |
| 1840 | 3092 | AATGGGTGACAAACAGGGTT | 2 | 2 | NC | NC |
| 1841 | 3093 | TAATGGGTGACAAACAGGGT | 2 | 2 | NC | NC |
| 1842 | 3094 | ATAATGGGTGACAAACAGGG | 1 | 2 | NC | NC |
| 1843 | 3095 | GATAATGGGTGACAAACAGG | 2 | 2 | NC | NC |
| 1844 | 3096 | GGATAATGGGTGACAAACAG | 2 | 2 | NC | NC |
| 1845 | 3097 | CGGATAATGGGTGACAAACA | 2 | 2 | NC | NC |
| 1846 | 3098 | GCGGATAATGGGTGACAAAC | 2 | 3 | NC | NC |
| 1847 | 3099 | GGCGGATAATGGGTGACAAA | 2 | 2 | NC | NC |
| 1848 | 3100 | TGGCGGATAATGGGTGACAA | 2 | 3 | NC | NC |
| 1849 | 3101 | CTGGCGGATAATGGGTGACA | 3 | 2 | NC | NC |
| 1850 | 3102 | ACTGGCGGATAATGGGTGAC | 3 | 2 | NC | NC |
| 1851 | 3103 | AACTGGCGGATAATGGGTGA | 2 | 1 | NC | NC |
| 1852 | 3104 | AAACTGGCGGATAATGGGTG | 3 | 2 | NC | NC |
| 1853 | 3105 | CAAACTGGCGGATAATGGGT | 3 | 3 | NC | NC |
| 1854 | 3106 | ACAAACTGGCGGATAATGGG | 3 | 3 | NC | NC |
| 1855 | 3107 | CACAAACTGGCGGATAATGG | 3 | 3 | NC | NC |
| 1856 | 3108 | TCACAAACTGGCGGATAATG | 3 | 3 | NC | NC |
| 1857 | 3109 | TTCACAAACTGGCGGATAAT | 2 | NC | NC | NC |
| 1858 | 3110 | GTTCACAAACTGGCGGATAA | 3 | NC | NC | NC |
| 1859 | 3135 | ACCTGGTGTGAGTAATTTTT | 2 | 2 | NC | NC |
| 1860 | 3146 | GGTAATTCCCCACCTGGTGT | 2 | 2 | NC | NC |
| 1861 | 3147 | TGGTAATTCCCCACCTGGTG | 2 | 3 | NC | NC |
| 1862 | 3154 | TCCCATGTGGTAATTCCCCA | 3 | 2 | 2 | NC |
| 1863 | 3155 | ATCCCATGTGGTAATTCCCC | 2 | 2 | 2 | NC |
| 1864 | 3156 | AATCCCATGTGGTAATTCCC | 2 | 3 | 2 | NC |
| 1865 | 3157 | GAATCCCATGTGGTAATTCC | 2 | 2 | 2 | NC |
| 1866 | 3158 | AGAATCCCATGTGGTAATTC | 2 | 2 | 1 | NC |
| 1867 | 3159 | AAGAATCCCATGTGGTAATT | 2 | 2 | 1 | NC |
| 1868 | 3160 | CAAGAATCCCATGTGGTAAT | 2 | 2 | 2 | NC |
| 1869 | 3161 | CCAAGAATCCCATGTGGTAA | 1 | 1 | 2 | NC |
| 1870 | 3164 | TGACCAAGAATCCCATGTGG | 2 | 2 | 2 | NC |
| 1871 | 3165 | CTGACCAAGAATCCCATGTG | 2 | 2 | NC | NC |
| 1872 | 3166 | ACTGACCAAGAATCCCATGT | 2 | NC | NC | NC |
| 1873 | 3167 | CACTGACCAAGAATCCCATG | 2 | NC | NC | NC |
| 1874 | 3168 | TCACTGACCAAGAATCCCAT | 2 | NC | NC | NC |
| 1875 | 3169 | CTCACTGACCAAGAATCCCA | 2 | NC | NC | NC |
| 1876 | 3170 | CCTCACTGACCAAGAATCCC | 2 | NC | NC | NC |
| 1877 | 3171 | TCCTCACTGACCAAGAATCC | 2 | NC | NC | NC |
| 1878 | 3172 | ATCCTCACTGACCAAGAATC | 2 | NC | NC | NC |
| 1879 | 3173 | CATCCTCACTGACCAAGAAT | 2 | NC | NC | NC |
| 1880 | 3174 | TCATCCTCACTGACCAAGAA | 2 | NC | NC | NC |
| 1881 | 3175 | TTCATCCTCACTGACCAAGA | 2 | NC | NC | NC |
| 1882 | 3176 | TTTCATCCTCACTGACCAAG | 2 | NC | NC | NC |
| 1883 | 3177 | CTTTCATCCTCACTGACCAA | 2 | NC | NC | NC |
| 1884 | 3178 | GCTTTCATCCTCACTGACCA | 2 | NC | NC | NC |
| 1885 | 3179 | TGCTTTCATCCTCACTGACC | 2 | NC | NC | NC |
| 1886 | 3180 | TTGCTTTCATCCTCACTGAC | 2 | NC | NC | NC |
| 1887 | 3181 | TTTGCTTTCATCCTCACTGA | 2 | NC | NC | NC |
| 1888 | 3182 | GTTTGCTTTCATCCTCACTG | 1 | NC | NC | NC |
| 1889 | 3183 | AGTTTGCTTTCATCCTCACT | 2 | NC | NC | NC |
| 1890 | 3184 | CAGTTTGCTTTCATCCTCAC | 2 | NC | NC | NC |
| 1891 | 3185 | CCAGTTTGCTTTCATCCTCA | 2 | NC | NC | NC |
| 1892 | 3186 | TCCAGTTTGCTTTCATCCTC | 2 | 2 | NC | NC |
| 1893 | 3187 | ATCCAGTTTGCTTTCATCCT | 2 | 2 | NC | NC |
| 1894 | 3188 | GATCCAGTTTGCTTTCATCC | 2 | 2 | NC | NC |
| 1895 | 3189 | GGATCCAGTTTGCTTTCATC | 2 | 2 | NC | NC |
| 1896 | 3190 | TGGATCCAGTTTGCTTTCAT | 2 | 2 | NC | NC |
| 1897 | 3205 | TTGTTCTGCTGCGCCTGGAT | 2 | NC | NC | NC |
| 1898 | 3213 | TCAGGGACTTGTTCTGCTGC | 2 | NC | NC | NC |
| 1899 | 3214 | ATCAGGGACTTGTTCTGCTG | 2 | NC | NC | NC |
| 1900 | 3215 | AATCAGGGACTTGTTCTGCT | 2 | NC | NC | NC |
| 1901 | 3216 | AAATCAGGGACTTGTTCTGC | 2 | NC | NC | NC |
| 1902 | 3217 | AAAATCAGGGACTTGTTCTG | 2 | NC | NC | NC |
| 1903 | 3218 | CAAAATCAGGGACTTGTTCT | 2 | 2 | NC | NC |
| 1904 | 3219 | ACAAAATCAGGGACTTGTTC | 2 | 2 | NC | NC |
| 1905 | 3220 | GACAAAATCAGGGACTTGTT | 2 | 2 | NC | NC |
| 1906 | 3221 | TGACAAAATCAGGGACTTGT | 2 | 2 | NC | NC |
| 1907 | 3222 | GTGACAAAATCAGGGACTTG | 2 | 2 | NC | NC |
| 1908 | 3223 | GGTGACAAAATCAGGGACTT | 2 | 2 | NC | NC |
| 1909 | 3224 | AGGTGACAAAATCAGGGACT | 1 | 1 | NC | NC |
| 1910 | 3225 | AAGGTGACAAAATCAGGGAC | 1 | 2 | NC | NC |
| 1911 | 3226 | GAAGGTGACAAAATCAGGGA | 1 | 2 | NC | NC |
| 1912 | 3227 | GGAAGGTGACAAAATCAGGG | 1 | 2 | NC | NC |
| 1913 | 3228 | AGGAAGGTGACAAAATCAGG | 1 | 2 | NC | NC |
| 1914 | 3229 | AAGGAAGGTGACAAAATCAG | 1 | 1 | NC | NC |
| 1915 | 3230 | AAAGGAAGGTGACAAAATCA | 1 | 1 | NC | NC |
| 1916 | 3231 | TAAAGGAAGGTGACAAAATC | 2 | 2 | NC | NC |
| 1917 | 3232 | GTAAAGGAAGGTGACAAAAT | 1 | 2 | NC | NC |
| 1918 | 3233 | GGTAAAGGAAGGTGACAAAA | 2 | 1 | NC | NC |
| 1919 | 3234 | TGGTAAAGGAAGGTGACAAA | 1 | 2 | NC | NC |
| 1920 | 3235 | TTGGTAAAGGAAGGTGACAA | 1 | 2 | NC | NC |
| 1921 | 3236 | TTTGGTAAAGGAAGGTGACA | 1 | 2 | NC | NC |
| 1922 | 3237 | ATTTGGTAAAGGAAGGTGAC | 2 | 1 | NC | NC |
| 1923 | 3238 | TATTTGGTAAAGGAAGGTGA | 2 | 2 | NC | NC |
| 1924 | 3239 | TTATTTGGTAAAGGAAGGTG | 1 | 1 | NC | NC |
| 1925 | 3240 | GTTATTTGGTAAAGGAAGGT | 2 | 2 | NC | NC |
| 1926 | 3241 | AGTTATTTGGTAAAGGAAGG | 2 | 2 | NC | NC |
| 1927 | 3242 | TAGTTATTTGGTAAAGGAAG | 2 | 2 | NC | NC |
| 1928 | 3243 | CTAGTTATTTGGTAAAGGAA | 2 | 2 | NC | NC |
| 1929 | 3244 | TCTAGTTATTTGGTAAAGGA | 2 | 2 | NC | NC |
| 1930 | 3245 | CTCTAGTTATTTGGTAAAGG | 1 | 1 | NC | NC |
| 1931 | 3246 | CCTCTAGTTATTTGGTAAAG | 2 | 2 | NC | NC |
| 1932 | 3247 | TCCTCTAGTTATTTGGTAAA | 1 | 2 | NC | NC |
| 1933 | 3248 | TTCCTCTAGTTATTTGGTAA | 1 | 1 | NC | NC |
| 1934 | 3249 | ATTCCTCTAGTTATTTGGTA | 1 | 1 | NC | NC |
| 1935 | 3250 | AATTCCTCTAGTTATTTGGT | 2 | 2 | NC | NC |
| 1936 | 3251 | CAATTCCTCTAGTTATTTGG | 2 | 1 | NC | NC |
| 1937 | 3252 | GCAATTCCTCTAGTTATTTG | 2 | 2 | NC | NC |
| 1938 | 3253 | TGCAATTCCTCTAGTTATTT | 1 | 2 | NC | NC |
| 1939 | 3254 | CTGCAATTCCTCTAGTTATT | 1 | 1 | NC | NC |
| 1940 | 3255 | GCTGCAATTCCTCTAGTTAT | 2 | 1 | NC | NC |
| 1941 | 3256 | TGCTGCAATTCCTCTAGTTA | 3 | 2 | NC | NC |
| 1942 | 3257 | TTGCTGCAATTCCTCTAGTT | 2 | 1 | NC | NC |
| 1943 | 3258 | CTTGCTGCAATTCCTCTAGT | 2 | 1 | NC | NC |
| 1944 | 3259 | CCTTGCTGCAATTCCTCTAG | 2 | 1 | NC | NC |
| 1945 | 3260 | TCCTTGCTGCAATTCCTCTA | 2 | 2 | NC | NC |
| 1946 | 3261 | CTCCTTGCTGCAATTCCTCT | 1 | 1 | NC | NC |
| 1947 | 3262 | ACTCCTTGCTGCAATTCCTC | 2 | 2 | NC | NC |
| 1948 | 3263 | AACTCCTTGCTGCAATTCCT | 2 | 2 | NC | NC |
| 1949 | 3264 | TAACTCCTTGCTGCAATTCC | 1 | 1 | NC | NC |
| 1950 | 3265 | ATAACTCCTTGCTGCAATTC | 1 | 1 | NC | NC |
| 1951 | 3266 | CATAACTCCTTGCTGCAATT | 1 | 1 | NC | NC |
| 1952 | 3267 | CCATAACTCCTTGCTGCAAT | 2 | 2 | NC | NC |
| 1953 | 3268 | TCCATAACTCCTTGCTGCAA | 2 | 2 | NC | NC |
| 1954 | 3269 | ATCCATAACTCCTTGCTGCA | 2 | 2 | NC | NC |
| 1955 | 3270 | AATCCATAACTCCTTGCTGC | 2 | 2 | NC | NC |
| 1956 | 3271 | TAATCCATAACTCCTTGCTG | 2 | 2 | NC | NC |
| 1957 | 3272 | TTAATCCATAACTCCTTGCT | 2 | 1 | NC | NC |
| 1958 | 3273 | TTTAATCCATAACTCCTTGC | 2 | 1 | NC | NC |
| 1959 | 3274 | ATTTAATCCATAACTCCTTG | 2 | 1 | NC | NC |
| 1960 | 3275 | CATTTAATCCATAACTCCTT | 2 | 1 | NC | NC |
| 1961 | 3276 | ACATTTAATCCATAACTCCT | 1 | 2 | NC | NC |
| 1962 | 3277 | CACATTTAATCCATAACTCC | 2 | 2 | NC | NC |
| 1963 | 3278 | CCACATTTAATCCATAACTC | 2 | 2 | NC | NC |
| 1964 | 3279 | GCCACATTTAATCCATAACT | 2 | 2 | NC | NC |
| 1965 | 3280 | AGCCACATTTAATCCATAAC | 2 | 2 | NC | NC |
| 1966 | 3281 | TAGCCACATTTAATCCATAA | 2 | 2 | NC | NC |
| 1967 | 3282 | TTAGCCACATTTAATCCATA | 2 | 2 | NC | NC |
| 1968 | 3283 | TTTAGCCACATTTAATCCAT | 2 | 1 | NC | NC |
| 1969 | 3284 | GTTTAGCCACATTTAATCCA | 2 | 2 | NC | NC |
| 1970 | 3285 | AGTTTAGCCACATTTAATCC | 2 | 2 | NC | NC |
| 1971 | 3286 | TAGTTTAGCCACATTTAATC | 2 | 2 | NC | NC |
| 1972 | 3287 | CTAGTTTAGCCACATTTAAT | 2 | 3 | NC | NC |
| 1973 | 3298 | AGGAACATCTGCTAGTTTAG | 2 | NC | NC | NC |
| 1974 | 3299 | CAGGAACATCTGCTAGTTTA | 2 | NC | NC | NC |
| 1975 | 3300 | CCAGGAACATCTGCTAGTTT | 2 | NC | NC | NC |
| 1976 | 3301 | TCCAGGAACATCTGCTAGTT | 2 | NC | NC | NC |
| 1977 | 3302 | CTCCAGGAACATCTGCTAGT | 2 | NC | NC | NC |
| 1978 | 3303 | TCTCCAGGAACATCTGCTAG | 2 | NC | NC | NC |
| 1979 | 3304 | TTCTCCAGGAACATCTGCTA | 2 | NC | NC | NC |
| 1980 | 3305 | TTTCTCCAGGAACATCTGCT | 1 | NC | NC | NC |
| 1981 | 3306 | ATTTCTCCAGGAACATCTGC | 2 | NC | NC | NC |
| 1982 | 3307 | AATTTCTCCAGGAACATCTG | 1 | NC | NC | NC |
| 1983 | 3308 | AAATTTCTCCAGGAACATCT | 2 | NC | NC | NC |
| 1984 | 3309 | AAAATTTCTCCAGGAACATC | 2 | NC | NC | NC |
| 1985 | 3310 | CAAAATTTCTCCAGGAACAT | 1 | NC | NC | NC |
| 1986 | 3311 | TCAAAATTTCTCCAGGAACA | 1 | NC | NC | NC |
| 1987 | 3312 | TTCAAAATTTCTCCAGGAAC | 2 | NC | NC | NC |
| 1988 | 3313 | CTTCAAAATTTCTCCAGGAA | 2 | 1 | NC | NC |
| 1989 | 3314 | TCTTCAAAATTTCTCCAGGA | 2 | 1 | NC | NC |
| 1990 | 3315 | TTCTTCAAAATTTCTCCAGG | 1 | 2 | NC | NC |
| 1991 | 3316 | TTTCTTCAAAATTTCTCCAG | 1 | 1 | NC | NC |
| 1992 | 3317 | CTTTCTTCAAAATTTCTCCA | 1 | 2 | NC | NC |
| 1993 | 3318 | GCTTTCTTCAAAATTTCTCC | 2 | 2 | NC | NC |
| 1994 | 3319 | TGCTTTCTTCAAAATTTCTC | 2 | 2 | NC | NC |
| 1995 | 3320 | CTGCTTTCTTCAAAATTTCT | 2 | 2 | NC | NC |
| 1996 | 3321 | GCTGCTTTCTTCAAAATTTC | 2 | 2 | NC | NC |
| 1997 | 3322 | AGCTGCTTTCTTCAAAATTT | 1 | 1 | NC | NC |
| 1998 | 3323 | GAGCTGCTTTCTTCAAAATT | 2 | 1 | NC | NC |
| 1999 | 3324 | TGAGCTGCTTTCTTCAAAAT | 2 | 1 | NC | NC |
| 2000 | 3325 | GTGAGCTGCTTTCTTCAAAA | 2 | 2 | NC | NC |
| 2001 | 3326 | TGTGAGCTGCTTTCTTCAAA | 2 | 2 | NC | NC |
| 2002 | 3327 | TTGTGAGCTGCTTTCTTCAA | 2 | 2 | NC | NC |
| 2003 | 3328 | CTTGTGAGCTGCTTTCTTCA | 1 | 1 | NC | NC |
| 2004 | 3329 | ACTTGTGAGCTGCTTTCTTC | 2 | 2 | NC | NC |
| 2005 | 3330 | GACTTGTGAGCTGCTTTCTT | 2 | 2 | NC | NC |
| 2006 | 3331 | TGACTTGTGAGCTGCTTTCT | 2 | 2 | NC | NC |
| 2007 | 3332 | TTGACTTGTGAGCTGCTTTC | 2 | 2 | NC | NC |
| 2008 | 3333 | TTTGACTTGTGAGCTGCTTT | 1 | 2 | NC | NC |
| 2009 | 3334 | TTTTGACTTGTGAGCTGCTT | 2 | 2 | NC | NC |
| 2010 | 3335 | CTTTTGACTTGTGAGCTGCT | 2 | 2 | NC | NC |
| 2011 | 3336 | TCTTTTGACTTGTGAGCTGC | 2 | 2 | NC | NC |
| 2012 | 3337 | CTCTTTTGACTTGTGAGCTG | 2 | 2 | NC | NC |
| 2013 | 3340 | CAGCTCTTTTGACTTGTGAG | 2 | 3 | NC | NC |
| 2014 | 3341 | CCAGCTCTTTTGACTTGTGA | 2 | 2 | NC | NC |
| 2015 | 3342 | TCCAGCTCTTTTGACTTGTG | 2 | 2 | NC | NC |
| 2016 | 3343 | TTCCAGCTCTTTTGACTTGT | 2 | 2 | NC | NC |
| 2017 | 3344 | CTTCCAGCTCTTTTGACTTG | 1 | 2 | NC | NC |
| 2018 | 3345 | CCTTCCAGCTCTTTTGACTT | 1 | 1 | NC | NC |
| 2019 | 3346 | TCCTTCCAGCTCTTTTGACT | 2 | 2 | NC | NC |
| 2020 | 3347 | ATCCTTCCAGCTCTTTTGAC | 2 | 2 | NC | NC |
| 2021 | 3348 | AATCCTTCCAGCTCTTTTGA | 1 | 1 | NC | NC |
| 2022 | 3349 | TAATCCTTCCAGCTCTTTTG | 1 | 2 | NC | NC |
| 2023 | 3350 | TTAATCCTTCCAGCTCTTTT | 1 | 2 | NC | NC |
| 2024 | 3351 | ATTAATCCTTCCAGCTCTTT | 1 | 1 | NC | NC |
| 2025 | 3352 | TATTAATCCTTCCAGCTCTT | 2 | 2 | NC | NC |
| 2026 | 3353 | TTATTAATCCTTCCAGCTCT | 2 | 2 | NC | NC |
| 2027 | 3354 | TTTATTAATCCTTCCAGCTC | 2 | 2 | NC | NC |
| 2028 | 3355 | ATTTATTAATCCTTCCAGCT | 1 | 2 | NC | NC |
| 2029 | 3356 | TATTTATTAATCCTTCCAGC | 2 | 2 | NC | NC |
| 2030 | 3357 | GTATTTATTAATCCTTCCAG | 1 | 1 | NC | NC |
| 2031 | 3358 | CGTATTTATTAATCCTTCCA | 1 | 2 | NC | NC |
| 2032 | 3359 | TCGTATTTATTAATCCTTCC | 2 | 2 | NC | NC |
| 2033 | 3360 | TTCGTATTTATTAATCCTTC | 1 | 2 | NC | NC |
| 2034 | 3363 | CTTTTCGTATTTATTAATCC | 2 | 2 | NC | NC |
| 2035 | 3369 | CTCTTTCTTTTCGTATTTAT | 1 | NC | NC | NC |
| 2036 | 3370 | TCTCTTTCTTTTCGTATTTA | 1 | NC | NC | NC |
| 2037 | 3371 | GTCTCTTTCTTTTCGTATTT | 2 | NC | NC | NC |
| 2038 | 3372 | AGTCTCTTTCTTTTCGTATT | 2 | NC | NC | NC |
| 2039 | 3373 | GAGTCTCTTTCTTTTCGTAT | 2 | NC | NC | NC |
| 2040 | 3374 | TGAGTCTCTTTCTTTTCGTA | 2 | NC | NC | NC |
| 2041 | 3375 | TTGAGTCTCTTTCTTTTCGT | 2 | NC | NC | NC |
| 2042 | 3376 | CTTGAGTCTCTTTCTTTTCG | 1 | NC | NC | NC |
| 2043 | 3377 | ACTTGAGTCTCTTTCTTTTC | 1 | NC | NC | NC |
| 2044 | 3378 | TACTTGAGTCTCTTTCTTTT | 2 | NC | NC | NC |
| 2045 | 3379 | ATACTTGAGTCTCTTTCTTT | 2 | NC | NC | NC |
| 2046 | 3380 | AATACTTGAGTCTCTTTCTT | 2 | NC | NC | NC |
| 2047 | 3381 | AAATACTTGAGTCTCTTTCT | 2 | NC | NC | NC |
| 2048 | 3382 | AAAATACTTGAGTCTCTTTC | 2 | NC | NC | NC |
| 2049 | 3383 | CAAAATACTTGAGTCTCTTT | 2 | NC | NC | NC |
| 2050 | 3384 | GCAAAATACTTGAGTCTCTT | 1 | 2 | NC | NC |
| 2051 | 3385 | TGCAAAATACTTGAGTCTCT | 1 | 2 | NC | NC |
| 2052 | 3386 | TTGCAAAATACTTGAGTCTC | 2 | 2 | NC | NC |
| 2053 | 3387 | TTTGCAAAATACTTGAGTCT | 1 | 1 | NC | NC |
| 2054 | 3388 | CTTTGCAAAATACTTGAGTC | 1 | 1 | NC | NC |
| 2055 | 3389 | ACTTTGCAAAATACTTGAGT | 2 | 2 | NC | NC |
| 2056 | 3390 | AACTTTGCAAAATACTTGAG | 1 | 2 | NC | NC |
| 2057 | 3391 | TAACTTTGCAAAATACTTGA | 2 | 1 | NC | NC |
| 2058 | 3392 | ATAACTTTGCAAAATACTTG | 2 | 2 | NC | NC |
| 2059 | 3393 | CATAACTTTGCAAAATACTT | 2 | 2 | NC | NC |
| 2060 | 3394 | CCATAACTTTGCAAAATACT | 1 | 1 | NC | NC |
| 2061 | 3395 | TCCATAACTTTGCAAAATAC | 2 | 2 | NC | NC |
| 2062 | 3396 | GTCCATAACTTTGCAAAATA | 2 | 2 | NC | NC |
| 2063 | 3397 | CGTCCATAACTTTGCAAAAT | 2 | 2 | NC | NC |
| 2064 | 3398 | TCGTCCATAACTTTGCAAAA | 2 | 2 | NC | NC |
| 2065 | 3399 | ATCGTCCATAACTTTGCAAA | 2 | 3 | NC | NC |
| 2066 | 3400 | CATCGTCCATAACTTTGCAA | 3 | 2 | NC | NC |
| 2067 | 3401 | GCATCGTCCATAACTTTGCA | 2 | 2 | NC | NC |
| 2068 | 3402 | TGCATCGTCCATAACTTTGC | 2 | 2 | NC | NC |
| 2069 | 3403 | ATGCATCGTCCATAACTTTG | 2 | 2 | NC | NC |
| 2070 | 3404 | TATGCATCGTCCATAACTTT | 3 | 2 | NC | NC |
| 2071 | 3405 | TTATGCATCGTCCATAACTT | 3 | 3 | NC | NC |
| 2072 | 3406 | ATTATGCATCGTCCATAACT | 2 | 2 | NC | NC |
| 2073 | 3407 | CATTATGCATCGTCCATAAC | 2 | 3 | NC | NC |
| 2074 | 3427 | CCACTTCTGCAGGTCTTGTG | 1 | 2 | NC | NC |
| 2075 | 3428 | TCCACTTCTGCAGGTCTTGT | 2 | 2 | NC | NC |
| 2076 | 3429 | GTCCACTTCTGCAGGTCTTG | 2 | 2 | NC | NC |
| 2077 | 3430 | TGTCCACTTCTGCAGGTCTT | 2 | 2 | NC | NC |
| 2078 | 3431 | CTGTCCACTTCTGCAGGTCT | 2 | 2 | NC | NC |
| 2079 | 3432 | TCTGTCCACTTCTGCAGGTC | 2 | 2 | NC | NC |
| 2080 | 3433 | CTCTGTCCACTTCTGCAGGT | 1 | 1 | NC | NC |
| 2081 | 3435 | TCCTCTGTCCACTTCTGCAG | 2 | 1 | NC | NC |
| 2082 | 3436 | CTCCTCTGTCCACTTCTGCA | 1 | 2 | NC | NC |
| 2083 | 3437 | ACTCCTCTGTCCACTTCTGC | 2 | 2 | NC | NC |
| 2084 | 3438 | AACTCCTCTGTCCACTTCTG | 1 | 1 | NC | NC |
| 2085 | 3439 | GAACTCCTCTGTCCACTTCT | 2 | 2 | NC | NC |
| 2086 | 3440 | TGAACTCCTCTGTCCACTTC | 1 | NC | NC | NC |
| 2087 | 3441 | TTGAACTCCTCTGTCCACTT | 1 | NC | NC | NC |
| 2088 | 3442 | GTTGAACTCCTCTGTCCACT | 2 | NC | NC | NC |
| 2089 | 3443 | TGTTGAACTCCTCTGTCCAC | 2 | NC | NC | NC |
| 2090 | 3444 | ATGTTGAACTCCTCTGTCCA | 2 | NC | NC | NC |
| 2091 | 3445 | CATGTTGAACTCCTCTGTCC | 2 | NC | NC | NC |
| 2092 | 3446 | CCATGTTGAACTCCTCTGTC | 2 | NC | NC | NC |
| 2093 | 3447 | TCCATGTTGAACTCCTCTGT | 2 | NC | NC | NC |
| 2094 | 3448 | TTCCATGTTGAACTCCTCTG | 2 | NC | NC | NC |
| 2095 | 3449 | CTTCCATGTTGAACTCCTCT | 2 | NC | NC | NC |
| 2096 | 3450 | TCTTCCATGTTGAACTCCTC | 2 | NC | NC | NC |
| 2097 | 3451 | TTCTTCCATGTTGAACTCCT | 2 | NC | NC | NC |
| 2098 | 3452 | TTTCTTCCATGTTGAACTCC | 2 | NC | NC | NC |
| 2099 | 3453 | GTTTCTTCCATGTTGAACTC | 2 | NC | NC | NC |
| 2100 | 3454 | TGTTTCTTCCATGTTGAACT | 2 | NC | NC | NC |
| 2101 | 3455 | GTGTTTCTTCCATGTTGAAC | 2 | NC | NC | NC |
| 2102 | 3456 | TGTGTTTCTTCCATGTTGAA | 1 | NC | NC | NC |
| 2103 | 3457 | CTGTGTTTCTTCCATGTTGA | 1 | NC | NC | NC |
| 2104 | 3458 | TCTGTGTTTCTTCCATGTTG | 2 | NC | NC | NC |
| 2105 | 3459 | GTCTGTGTTTCTTCCATGTT | 2 | NC | NC | NC |
| 2106 | 3460 | AGTCTGTGTTTCTTCCATGT | 2 | NC | NC | NC |
| 2107 | 3461 | AAGTCTGTGTTTCTTCCATG | 2 | NC | NC | NC |
| 2108 | 3462 | GAAGTCTGTGTTTCTTCCAT | 2 | 2 | NC | NC |
| 2109 | 3463 | AGAAGTCTGTGTTTCTTCCA | 1 | 1 | NC | NC |
| 2110 | 3464 | GAGAAGTCTGTGTTTCTTCC | 2 | 2 | NC | NC |
| 2111 | 3466 | AAGAGAAGTCTGTGTTTCTT | 2 | 1 | NC | NC |
| 2112 | 3467 | GAAGAGAAGTCTGTGTTTCT | 1 | 1 | NC | NC |
| 2113 | 3468 | AGAAGAGAAGTCTGTGTTTC | 1 | NC | NC | NC |
| 2114 | 3469 | AAGAAGAGAAGTCTGTGTTT | 2 | NC | NC | NC |
| 2115 | 3470 | GAAGAAGAGAAGTCTGTGTT | 1 | NC | NC | NC |
| 2116 | 3471 | TGAAGAAGAGAAGTCTGTGT | 1 | NC | NC | NC |
| 2117 | 3472 | ATGAAGAAGAGAAGTCTGTG | 1 | NC | NC | NC |
| 2118 | 3473 | AATGAAGAAGAGAAGTCTGT | 2 | NC | NC | NC |
| 2119 | 3474 | TAATGAAGAAGAGAAGTCTG | 2 | NC | NC | NC |
| 2120 | 3475 | TTAATGAAGAAGAGAAGTCT | 2 | NC | NC | NC |
| 2121 | 3476 | TTTAATGAAGAAGAGAAGTC | 2 | NC | NC | NC |
| 2122 | 3477 | TTTTAATGAAGAAGAGAAGT | 1 | NC | NC | NC |
| 2123 | 3478 | ATTTTAATGAAGAAGAGAAG | 1 | NC | NC | NC |
| 2124 | 3495 | TCACAAATGTAGTCTTCATT | 2 | NC | NC | NC |
| 2125 | 3496 | TTCACAAATGTAGTCTTCAT | 2 | NC | NC | NC |
| 2126 | 3497 | GTTCACAAATGTAGTCTTCA | 2 | NC | NC | NC |
| 2127 | 3498 | TGTTCACAAATGTAGTCTTC | 1 | NC | NC | NC |
| 2128 | 3499 | TTGTTCACAAATGTAGTCTT | 2 | NC | NC | NC |
| 2129 | 3521 | GGTATTTTTAATTCTCCATT | 1 | 1 | NC | NC |
| 2130 | 3522 | TGGTATTTTTAATTCTCCAT | 1 | 1 | NC | NC |
| 2131 | 3523 | TTGGTATTTTTAATTCTCCA | 1 | 1 | NC | NC |
| 2132 | 3524 | GTTGGTATTTTTAATTCTCC | 2 | 2 | NC | NC |
| 2133 | 3525 | AGTTGGTATTTTTAATTCTC | 1 | 1 | NC | NC |
| 2134 | 3526 | CAGTTGGTATTTTTAATTCT | 1 | 1 | NC | NC |
| 2135 | 3527 | ACAGTTGGTATTTTTAATTC | 2 | 1 | NC | NC |
| 2136 | 3529 | GTACAGTTGGTATTTTTAAT | 1 | 1 | NC | NC |
| 2137 | 3530 | TGTACAGTTGGTATTTTTAA | 1 | 1 | NC | NC |
| 2138 | 3531 | TTGTACAGTTGGTATTTTTA | 2 | 2 | NC | NC |
| 2139 | 3532 | TTTGTACAGTTGGTATTTTT | 1 | 1 | NC | NC |
| 2140 | 3533 | TTTTGTACAGTTGGTATTTT | 2 | 1 | NC | NC |
| 2141 | 3534 | ATTTTGTACAGTTGGTATTT | 2 | 1 | NC | NC |
| 2142 | 3535 | TATTTTGTACAGTTGGTATT | 1 | 1 | NC | NC |
| 2143 | 3536 | TTATTTTGTACAGTTGGTAT | 2 | 2 | NC | NC |
| 2144 | 3537 | GTTATTTTGTACAGTTGGTA | 3 | 2 | NC | NC |
| 2145 | 3538 | AGTTATTTTGTACAGTTGGT | 3 | 2 | NC | NC |
| 2146 | 3539 | GAGTTATTTTGTACAGTTGG | 2 | 2 | NC | NC |
| 2147 | 3540 | AGAGTTATTTTGTACAGTTG | 2 | 2 | NC | NC |
| 2148 | 3541 | GAGAGTTATTTTGTACAGTT | 2 | 1 | NC | NC |
| 2149 | 3542 | GGAGAGTTATTTTGTACAGT | 2 | 2 | NC | NC |
| 2150 | 3543 | TGGAGAGTTATTTTGTACAG | 2 | 1 | NC | NC |
| 2151 | 3544 | CTGGAGAGTTATTTTGTACA | 1 | 2 | NC | NC |
| 2152 | 3545 | ACTGGAGAGTTATTTTGTAC | 1 | 2 | NC | NC |
| 2153 | 3546 | TACTGGAGAGTTATTTTGTA | 1 | 1 | NC | NC |
| 2154 | 3547 | TTACTGGAGAGTTATTTTGT | 1 | 1 | NC | NC |
| 2155 | 3548 | GTTACTGGAGAGTTATTTTG | 1 | 2 | NC | NC |
| 2156 | 3549 | TGTTACTGGAGAGTTATTTT | 2 | 2 | NC | NC |
| 2157 | 3550 | CTGTTACTGGAGAGTTATTT | 2 | 2 | NC | NC |
| 2158 | 3551 | GCTGTTACTGGAGAGTTATT | 2 | 2 | NC | NC |
| 2159 | 3552 | GGCTGTTACTGGAGAGTTAT | 2 | 2 | NC | NC |
| 2160 | 3553 | AGGCTGTTACTGGAGAGTTA | 2 | 2 | NC | NC |
| 2161 | 3554 | TAGGCTGTTACTGGAGAGTT | 1 | 2 | NC | NC |
| 2162 | 3555 | ATAGGCTGTTACTGGAGAGT | 1 | 2 | NC | NC |
| 2163 | 3556 | GATAGGCTGTTACTGGAGAG | 1 | NC | NC | NC |
| 2164 | 3557 | AGATAGGCTGTTACTGGAGA | 2 | NC | NC | NC |
| 2165 | 3558 | AAGATAGGCTGTTACTGGAG | 2 | NC | NC | NC |
| 2166 | 3559 | AAAGATAGGCTGTTACTGGA | 2 | NC | NC | NC |
| 2167 | 3560 | CAAAGATAGGCTGTTACTGG | 2 | NC | NC | NC |
| 2168 | 3561 | ACAAAGATAGGCTGTTACTG | 1 | NC | NC | NC |
| 2169 | 3562 | CACAAAGATAGGCTGTTACT | 2 | NC | NC | NC |
| 2170 | 3563 | ACACAAAGATAGGCTGTTAC | 2 | NC | NC | NC |
| 2171 | 3564 | CACACAAAGATAGGCTGTTA | 2 | NC | NC | NC |
| 2172 | 3565 | TCACACAAAGATAGGCTGTT | 2 | NC | NC | NC |
| 2173 | 3566 | GTCACACAAAGATAGGCTGT | 2 | NC | NC | NC |
| 2174 | 3567 | TGTCACACAAAGATAGGCTG | 2 | NC | NC | NC |
| 2175 | 3568 | ATGTCACACAAAGATAGGCT | 2 | NC | NC | NC |
| 2176 | 3569 | CATGTCACACAAAGATAGGC | 1 | NC | NC | NC |
| 2177 | 3570 | ACATGTCACACAAAGATAGG | 2 | NC | NC | NC |
| 2178 | 3571 | CACATGTCACACAAAGATAG | 2 | NC | NC | NC |
| 2179 | 3572 | TCACATGTCACACAAAGATA | 2 | NC | NC | NC |
| 2180 | 3573 | CTCACATGTCACACAAAGAT | 2 | NC | NC | NC |
| 2181 | 3574 | GCTCACATGTCACACAAAGA | 1 | NC | NC | NC |
| 2182 | 3575 | TGCTCACATGTCACACAAAG | 1 | NC | NC | NC |
| 2183 | 3576 | ATGCTCACATGTCACACAAA | 1 | 1 | NC | NC |
| 2184 | 3577 | TATGCTCACATGTCACACAA | 1 | 1 | NC | NC |
| 2185 | 3578 | TTATGCTCACATGTCACACA | 1 | 1 | NC | NC |
| 2186 | 3579 | TTTATGCTCACATGTCACAC | 1 | 1 | NC | NC |
| 2187 | 3580 | TTTTATGCTCACATGTCACA | 1 | 1 | NC | NC |
| 2188 | 3581 | ATTTTATGCTCACATGTCAC | 2 | 2 | NC | NC |
| 2189 | 3582 | AATTTTATGCTCACATGTCA | 1 | 2 | NC | NC |
| 2190 | 3583 | TAATTTTATGCTCACATGTC | 2 | 1 | NC | NC |
| 2191 | 3584 | ATAATTTTATGCTCACATGT | 2 | 1 | NC | NC |
| 2192 | 3585 | CATAATTTTATGCTCACATG | 1 | 1 | NC | NC |
| 2193 | 3594 | TACCATGGTCATAATTTTAT | 2 | 2 | NC | NC |
| 2194 | 3595 | ATACCATGGTCATAATTTTA | 2 | 2 | NC | NC |
| 2195 | 3596 | TATACCATGGTCATAATTTT | 1 | 2 | NC | NC |
| 2196 | 3597 | ATATACCATGGTCATAATTT | 1 | 2 | NC | NC |
| 2197 | 3598 | AATATACCATGGTCATAATT | 1 | 2 | NC | NC |
| 2198 | 3599 | GAATATACCATGGTCATAAT | 2 | 2 | NC | NC |
| 2199 | 3600 | GGAATATACCATGGTCATAA | 1 | 2 | NC | NC |
| 2200 | 3601 | AGGAATATACCATGGTCATA | 0 | 1 | NC | NC |
| 2201 | 3602 | TAGGAATATACCATGGTCAT | 1 | 2 | NC | NC |
| 2202 | 3603 | ATAGGAATATACCATGGTCA | 2 | NC | NC | NC |
| 2203 | 3604 | AATAGGAATATACCATGGTC | 2 | NC | NC | NC |
| 2204 | 3605 | CAATAGGAATATACCATGGT | 2 | NC | NC | NC |
| 2205 | 3606 | CCAATAGGAATATACCATGG | 2 | NC | NC | NC |
| 2206 | 3618 | ACCTCTCTGTTTCCAATAGG | 2 | NC | NC | NC |
| 2207 | 3619 | AACCTCTCTGTTTCCAATAG | 2 | NC | NC | NC |
| 2208 | 3620 | AAACCTCTCTGTTTCCAATA | 1 | NC | NC | NC |
| 2209 | 3621 | AAAACCTCTCTGTTTCCAAT | 2 | NC | NC | NC |
| 2210 | 3622 | AAAAACCTCTCTGTTTCCAA | 1 | NC | NC | NC |
| 2211 | 3623 | GAAAAACCTCTCTGTTTCCA | 1 | 2 | NC | NC |
| 2212 | 3624 | AGAAAAACCTCTCTGTTTCC | 1 | 2 | NC | NC |
| 2213 | 3625 | CAGAAAAACCTCTCTGTTTC | 1 | 1 | NC | NC |
| 2214 | 3630 | GTCTTCAGAAAAACCTCTCT | 2 | 1 | NC | NC |
| 2215 | 3631 | TGTCTTCAGAAAAACCTCTC | 2 | 2 | NC | NC |
| 2216 | 3643 | CTTGAAAAAGACTGTCTTCA | 2 | NC | NC | NC |
| 2217 | 3644 | ACTTGAAAAAGACTGTCTTC | 2 | NC | NC | NC |
| 2218 | 3645 | AACTTGAAAAAGACTGTCTT | 1 | NC | NC | NC |
| 2219 | 3646 | AAACTTGAAAAAGACTGTCT | 2 | NC | NC | NC |
| 2220 | 3647 | GAAACTTGAAAAAGACTGTC | 2 | NC | NC | NC |
| 2221 | 3648 | AGAAACTTGAAAAAGACTGT | 2 | NC | NC | NC |
| 2222 | 3649 | CAGAAACTTGAAAAAGACTG | 2 | NC | NC | NC |
| 2223 | 3650 | ACAGAAACTTGAAAAAGACT | 2 | NC | NC | NC |
| 2224 | 3651 | GACAGAAACTTGAAAAAGAC | 1 | NC | NC | NC |
| 2225 | 3652 | AGACAGAAACTTGAAAAAGA | 1 | NC | NC | NC |
| 2226 | 3653 | AAGACAGAAACTTGAAAAAG | 1 | NC | NC | NC |
| 2227 | 3654 | GAAGACAGAAACTTGAAAAA | 1 | NC | NC | NC |
| 2228 | 3655 | GGAAGACAGAAACTTGAAAA | 1 | NC | NC | NC |
| 2229 | 3656 | AGGAAGACAGAAACTTGAAA | 1 | NC | NC | NC |
| 2230 | 3657 | TAGGAAGACAGAAACTTGAA | 1 | NC | NC | NC |
| 2231 | 3658 | TTAGGAAGACAGAAACTTGA | 1 | NC | NC | NC |
| 2232 | 3659 | GTTAGGAAGACAGAAACTTG | 1 | NC | NC | NC |
| 2233 | 3660 | AGTTAGGAAGACAGAAACTT | 2 | NC | NC | NC |
| 2234 | 3661 | AAGTTAGGAAGACAGAAACT | 2 | NC | NC | NC |
| 2235 | 3662 | AAAGTTAGGAAGACAGAAAC | 2 | NC | NC | NC |
| 2236 | 3663 | AAAAGTTAGGAAGACAGAAA | 2 | NC | NC | NC |
| 2237 | 3664 | GAAAAGTTAGGAAGACAGAA | 2 | NC | NC | NC |
| 2238 | 3665 | AGAAAAGTTAGGAAGACAGA | 1 | NC | NC | NC |
| 2239 | 3666 | TAGAAAAGTTAGGAAGACAG | 2 | 2 | NC | NC |
| 2240 | 3667 | GTAGAAAAGTTAGGAAGACA | 2 | NC | NC | NC |
| 2241 | 3668 | CGTAGAAAAGTTAGGAAGAC | 2 | NC | NC | NC |
| 2242 | 3669 | ACGTAGAAAAGTTAGGAAGA | 2 | NC | NC | NC |
| 2243 | 3670 | TACGTAGAAAAGTTAGGAAG | 2 | NC | NC | NC |
| 2244 | 3671 | ATACGTAGAAAAGTTAGGAA | 2 | NC | NC | NC |
| 2245 | 3672 | TATACGTAGAAAAGTTAGGA | 2 | NC | NC | NC |
| 2246 | 3673 | TTATACGTAGAAAAGTTAGG | 2 | NC | NC | NC |
| 2247 | 3674 | TTTATACGTAGAAAAGTTAG | 2 | NC | NC | NC |
| 2248 | 3675 | GTTTATACGTAGAAAAGTTA | 2 | NC | NC | NC |
| 2249 | 3676 | TGTTTATACGTAGAAAAGTT | 2 | NC | NC | NC |
| 2250 | 3677 | GTGTTTATACGTAGAAAAGT | 2 | NC | NC | NC |
| 2251 | 3678 | AGTGTTTATACGTAGAAAAG | 2 | NC | NC | NC |
| 2252 | 3679 | GAGTGTTTATACGTAGAAAA | 2 | NC | NC | NC |
| 2253 | 3680 | AGAGTGTTTATACGTAGAAA | 2 | NC | NC | NC |
| 2254 | 3681 | AAGAGTGTTTATACGTAGAA | 2 | NC | NC | NC |
| 2255 | 3682 | CAAGAGTGTTTATACGTAGA | 2 | NC | NC | NC |
| 2256 | 3683 | TCAAGAGTGTTTATACGTAG | 2 | NC | NC | NC |
| 2257 | 3684 | TTCAAGAGTGTTTATACGTA | 2 | NC | NC | NC |
| 2258 | 3685 | ATTCAAGAGTGTTTATACGT | 2 | NC | NC | NC |
| 2259 | 3686 | TATTCAAGAGTGTTTATACG | 2 | NC | NC | NC |
| 2260 | 3687 | CTATTCAAGAGTGTTTATAC | 2 | 1 | NC | NC |
| 2261 | 3688 | TCTATTCAAGAGTGTTTATA | 2 | 1 | NC | NC |
| 2262 | 3689 | GTCTATTCAAGAGTGTTTAT | 2 | 2 | NC | NC |
| 2263 | 3690 | AGTCTATTCAAGAGTGTTTA | 2 | 2 | NC | NC |
| 2264 | 3691 | AAGTCTATTCAAGAGTGTTT | 2 | 2 | NC | NC |
| 2265 | 3692 | GAAGTCTATTCAAGAGTGTT | 2 | 2 | NC | NC |
| 2266 | 3693 | GGAAGTCTATTCAAGAGTGT | 2 | 2 | NC | NC |
| 2267 | 3694 | TGGAAGTCTATTCAAGAGTG | 2 | 2 | NC | NC |
| 2268 | 3696 | AGTGGAAGTCTATTCAAGAG | 2 | 1 | NC | NC |
| 2269 | 3697 | AAGTGGAAGTCTATTCAAGA | 2 | 2 | NC | NC |
| 2270 | 3698 | AAAGTGGAAGTCTATTCAAG | 2 | 2 | NC | NC |
| 2271 | 3699 | CAAAGTGGAAGTCTATTCAA | 2 | 2 | NC | NC |
| 2272 | 3700 | ACAAAGTGGAAGTCTATTCA | 2 | 2 | NC | NC |
| 2273 | 3701 | TACAAAGTGGAAGTCTATTC | 1 | 2 | NC | NC |
| 2274 | 3702 | TTACAAAGTGGAAGTCTATT | 2 | 2 | NC | NC |
| 2275 | 3703 | ATTACAAAGTGGAAGTCTAT | 2 | 2 | NC | NC |
| 2276 | 3704 | AATTACAAAGTGGAAGTCTA | 2 | 2 | NC | NC |
| 2277 | 3705 | TAATTACAAAGTGGAAGTCT | 2 | 1 | NC | NC |
| 2278 | 3706 | CTAATTACAAAGTGGAAGTC | 2 | 2 | NC | NC |
| 2279 | 3707 | TCTAATTACAAAGTGGAAGT | 2 | 2 | NC | NC |
| 2280 | 3708 | TTCTAATTACAAAGTGGAAG | 2 | 2 | NC | NC |
| 2281 | 3709 | TTTCTAATTACAAAGTGGAA | 2 | 1 | NC | NC |
| 2282 | 3710 | TTTTCTAATTACAAAGTGGA | 1 | 1 | NC | NC |
| 2283 | 3711 | ATTTTCTAATTACAAAGTGG | 1 | 1 | NC | NC |
| 2284 | 3722 | CTGTCCATAAAATTTTCTAA | 2 | NC | NC | NC |
| 2285 | 3723 | ACTGTCCATAAAATTTTCTA | 2 | NC | NC | NC |
| 2286 | 3724 | TACTGTCCATAAAATTTTCT | 2 | NC | NC | NC |
| 2287 | 3725 | TTACTGTCCATAAAATTTTC | 2 | NC | NC | NC |
| 2288 | 3726 | CTTACTGTCCATAAAATTTT | 2 | NC | NC | NC |
| 2289 | 3727 | ACTTACTGTCCATAAAATTT | 1 | NC | NC | NC |
| 2290 | 3738 | GGCTTTACTGGACTTACTGT | 2 | 1 | NC | NC |
| 2291 | 3739 | AGGCTTTACTGGACTTACTG | 2 | 1 | NC | NC |
| 2292 | 3740 | AAGGCTTTACTGGACTTACT | 2 | 1 | NC | NC |
| 2293 | 3741 | TAAGGCTTTACTGGACTTAC | 2 | 2 | NC | NC |
| 2294 | 3742 | TTAAGGCTTTACTGGACTTA | 2 | 2 | NC | NC |
| 2295 | 3743 | CTTAAGGCTTTACTGGACTT | 2 | 2 | NC | NC |
| 2296 | 3744 | ACTTAAGGCTTTACTGGACT | 3 | 2 | NC | NC |
| 2297 | 3745 | CACTTAAGGCTTTACTGGAC | 2 | 3 | NC | NC |
| 2298 | 3746 | CCACTTAAGGCTTTACTGGA | 2 | 2 | NC | NC |
| 2299 | 3756 | TTATATTCTGCCACTTAAGG | 2 | 2 | NC | NC |
| 2300 | 3757 | ATTATATTCTGCCACTTAAG | 2 | 2 | NC | NC |
| 2301 | 3758 | AATTATATTCTGCCACTTAA | 2 | 2 | NC | NC |
| 2302 | 3759 | GAATTATATTCTGCCACTTA | 2 | 2 | NC | NC |
| 2303 | 3760 | GGAATTATATTCTGCCACTT | 2 | 2 | NC | NC |
| 2304 | 3761 | GGGAATTATATTCTGCCACT | 3 | 3 | NC | NC |
| 2305 | 3762 | TGGGAATTATATTCTGCCAC | 2 | 2 | NC | NC |
| 2306 | 3763 | TTGGGAATTATATTCTGCCA | 2 | 2 | NC | NC |
| 2307 | 3764 | CTTGGGAATTATATTCTGCC | 3 | 2 | NC | NC |
| 2308 | 3765 | GCTTGGGAATTATATTCTGC | 2 | 3 | NC | NC |
| 2309 | 3766 | AGCTTGGGAATTATATTCTG | 2 | 2 | NC | NC |
| 2310 | 3767 | AAGCTTGGGAATTATATTCT | 1 | 2 | NC | NC |
| 2311 | 3768 | AAAGCTTGGGAATTATATTC | 1 | 2 | NC | NC |
| 2312 | 3769 | AAAAGCTTGGGAATTATATT | 2 | 2 | NC | NC |
| 2313 | 3770 | CAAAAGCTTGGGAATTATAT | 2 | 2 | NC | NC |
| 2314 | 3780 | TATCACCCTCCAAAAGCTTG | 2 | 2 | NC | NC |
| 2315 | 3781 | ATATCACCCTCCAAAAGCTT | 1 | 2 | NC | NC |
| 2316 | 3782 | TATATCACCCTCCAAAAGCT | 2 | 2 | NC | NC |
| 2317 | 3783 | TTATATCACCCTCCAAAAGC | 2 | 2 | NC | NC |
| 2318 | 3784 | TTTATATCACCCTCCAAAAG | 2 | 1 | NC | NC |
| 2319 | 3785 | TTTTATATCACCCTCCAAAA | 1 | 1 | NC | NC |
| 2320 | 3786 | TTTTTATATCACCCTCCAAA | 2 | 1 | NC | NC |
| 2321 | 3787 | ATTTTTATATCACCCTCCAA | 2 | 2 | NC | NC |
| 2322 | 3788 | AATTTTTATATCACCCTCCA | 2 | 2 | NC | NC |
| 2323 | 3789 | AAATTTTTATATCACCCTCC | 2 | 2 | NC | NC |
| 2324 | 3790 | TAAATTTTTATATCACCCTC | 2 | 2 | NC | NC |
| 2325 | 3791 | GTAAATTTTTATATCACCCT | 3 | 2 | NC | NC |
| 2326 | 3792 | AGTAAATTTTTATATCACCC | 2 | 2 | NC | NC |
| 2327 | 3818 | CTGAACTGAAACAAATAAAA | 1 | 1 | NC | NC |
| 2328 | 3819 | TCTGAACTGAAACAAATAAA | 1 | 1 | NC | NC |
| 2329 | 3820 | ATCTGAACTGAAACAAATAA | 1 | 1 | NC | NC |
| 2330 | 3821 | TATCTGAACTGAAACAAATA | 2 | 1 | NC | NC |
| 2331 | 3822 | TTATCTGAACTGAAACAAAT | 1 | 1 | NC | NC |
| 2332 | 3823 | ATTATCTGAACTGAAACAAA | 1 | 1 | NC | NC |
| 2333 | 3824 | AATTATCTGAACTGAAACAA | 1 | 1 | NC | NC |
| 2334 | 3825 | CAATTATCTGAACTGAAACA | 2 | 2 | NC | NC |
| 2335 | 3826 | CCAATTATCTGAACTGAAAC | 2 | 2 | NC | NC |
| 2336 | 3827 | GCCAATTATCTGAACTGAAA | 2 | 2 | NC | NC |
| 2337 | 3828 | TGCCAATTATCTGAACTGAA | 2 | 2 | NC | NC |
| 2338 | 3829 | TTGCCAATTATCTGAACTGA | 2 | NC | NC | NC |
| 2339 | 3830 | GTTGCCAATTATCTGAACTG | 2 | NC | NC | NC |
| 2340 | 3831 | AGTTGCCAATTATCTGAACT | 2 | NC | NC | NC |
| 2341 | 3832 | CAGTTGCCAATTATCTGAAC | 2 | NC | NC | NC |
| 2342 | 3833 | CCAGTTGCCAATTATCTGAA | 2 | NC | NC | NC |
| 2343 | 3834 | CCCAGTTGCCAATTATCTGA | 2 | NC | NC | NC |
| 2344 | 3835 | ACCCAGTTGCCAATTATCTG | 2 | NC | NC | NC |
| 2345 | 3836 | CACCCAGTTGCCAATTATCT | 2 | NC | NC | NC |
| 2346 | 3837 | TCACCCAGTTGCCAATTATC | 3 | NC | NC | NC |
| 2347 | 3838 | TTCACCCAGTTGCCAATTAT | 2 | NC | NC | NC |
| 2348 | 3839 | ATTCACCCAGTTGCCAATTA | 2 | NC | NC | NC |
| 2349 | 3840 | GATTCACCCAGTTGCCAATT | 3 | NC | NC | NC |
| 2350 | 3841 | AGATTCACCCAGTTGCCAAT | 2 | NC | NC | NC |
| 2351 | 3842 | CAGATTCACCCAGTTGCCAA | 2 | NC | NC | NC |
| 2352 | 3843 | CCAGATTCACCCAGTTGCCA | 2 | NC | NC | NC |
| 2353 | 3845 | TGCCAGATTCACCCAGTTGC | 2 | NC | NC | NC |
| 2354 | 3846 | CTGCCAGATTCACCCAGTTG | 1 | NC | NC | NC |
| 2355 | 3847 | CCTGCCAGATTCACCCAGTT | 1 | NC | NC | NC |
| 2356 | 3848 | TCCTGCCAGATTCACCCAGT | 2 | NC | NC | NC |
| 2357 | 3849 | TTCCTGCCAGATTCACCCAG | 2 | 1 | NC | NC |
| 2358 | 3850 | ATTCCTGCCAGATTCACCCA | 2 | 2 | NC | NC |
| 2359 | 3851 | GATTCCTGCCAGATTCACCC | 2 | 2 | NC | NC |
| 2360 | 3852 | AGATTCCTGCCAGATTCACC | 2 | 2 | NC | NC |
| 2361 | 3853 | TAGATTCCTGCCAGATTCAC | 2 | NC | NC | NC |
| 2362 | 3854 | ATAGATTCCTGCCAGATTCA | 2 | NC | NC | NC |
| 2363 | 3855 | GATAGATTCCTGCCAGATTC | 2 | NC | NC | NC |
| 2364 | 3866 | TTAGTTCAATGGATAGATTC | 2 | NC | NC | NC |
| 2365 | 3867 | TTTAGTTCAATGGATAGATT | 2 | NC | NC | NC |
| 2366 | 3868 | TTTTAGTTCAATGGATAGAT | 1 | NC | NC | NC |
| 2367 | 3869 | ATTTTAGTTCAATGGATAGA | 1 | NC | NC | NC |
| 2368 | 3870 | TATTTTAGTTCAATGGATAG | 2 | NC | NC | NC |
| 2369 | 3888 | CTGGTTGCATAATAAAATTA | 2 | NC | NC | NC |
| 2370 | 3889 | ACTGGTTGCATAATAAAATT | 2 | NC | NC | NC |
| 2371 | 3890 | AACTGGTTGCATAATAAAAT | 1 | NC | NC | NC |
| 2372 | 3891 | AAACTGGTTGCATAATAAAA | 1 | NC | NC | NC |
| 2373 | 3892 | TAAACTGGTTGCATAATAAA | 2 | NC | NC | NC |
| 2374 | 3893 | ATAAACTGGTTGCATAATAA | 2 | NC | NC | NC |
| 2375 | 3894 | GATAAACTGGTTGCATAATA | 2 | NC | NC | NC |
| 2376 | 3895 | GGATAAACTGGTTGCATAAT | 2 | NC | NC | NC |
| 2377 | 3896 | TGGATAAACTGGTTGCATAA | 2 | NC | NC | NC |
| 2378 | 3897 | GTGGATAAACTGGTTGCATA | 2 | NC | NC | NC |
| 2379 | 3898 | GGTGGATAAACTGGTTGCAT | 2 | NC | NC | NC |
| 2380 | 3899 | TGGTGGATAAACTGGTTGCA | 2 | NC | NC | NC |
| 2381 | 3900 | TTGGTGGATAAACTGGTTGC | 3 | NC | NC | NC |
| 2382 | 3901 | CTTGGTGGATAAACTGGTTG | 2 | NC | NC | NC |
| 2383 | 3902 | TCTTGGTGGATAAACTGGTT | 2 | NC | NC | NC |
| 2384 | 3903 | TTCTTGGTGGATAAACTGGT | 2 | NC | NC | NC |
| 2385 | 3904 | GTTCTTGGTGGATAAACTGG | 2 | 2 | NC | NC |
| 2386 | 3905 | TGTTCTTGGTGGATAAACTG | 1 | 1 | NC | NC |
| 2387 | 3906 | ATGTTCTTGGTGGATAAACT | 1 | 1 | NC | NC |
| 2388 | 3907 | TATGTTCTTGGTGGATAAAC | 2 | 2 | NC | NC |
| 2389 | 3908 | TTATGTTCTTGGTGGATAAA | 2 | 1 | NC | NC |
| 2390 | 3909 | CTTATGTTCTTGGTGGATAA | 2 | 2 | NC | NC |
| 2391 | 3910 | TCTTATGTTCTTGGTGGATA | 2 | 2 | NC | NC |
| 2392 | 3911 | TTCTTATGTTCTTGGTGGAT | 2 | 2 | NC | NC |
| 2393 | 3912 | ATTCTTATGTTCTTGGTGGA | 2 | 2 | NC | NC |
| 2394 | 3913 | AATTCTTATGTTCTTGGTGG | 2 | 2 | NC | NC |
| 2395 | 3914 | AAATTCTTATGTTCTTGGTG | 2 | 2 | NC | NC |
| 2396 | 3915 | AAAATTCTTATGTTCTTGGT | 2 | 1 | NC | NC |
| 2397 | 3916 | AAAAATTCTTATGTTCTTGG | 2 | 1 | NC | NC |
| 2398 | 3935 | CCAATTCTTTCTACTTATAA | 1 | NC | NC | NC |
| 2399 | 3936 | GCCAATTCTTTCTACTTATA | 2 | NC | NC | NC |
| 2400 | 3937 | GGCCAATTCTTTCTACTTAT | 2 | NC | NC | NC |
| 2401 | 3938 | TGGCCAATTCTTTCTACTTA | 2 | NC | NC | NC |
| 2402 | 3939 | CTGGCCAATTCTTTCTACTT | 2 | NC | NC | NC |
| 2403 | 3940 | CCTGGCCAATTCTTTCTACT | 2 | NC | NC | NC |
| 2404 | 3941 | GCCTGGCCAATTCTTTCTAC | 2 | NC | NC | NC |
| 2405 | 3942 | TGCCTGGCCAATTCTTTCTA | 1 | 1 | NC | NC |
| 2406 | 3943 | ATGCCTGGCCAATTCTTTCT | 1 | 0 | NC | NC |
| 2407 | 3944 | CATGCCTGGCCAATTCTTTC | 1 | 0 | NC | NC |
| 2408 | 3945 | CCATGCCTGGCCAATTCTTT | 1 | 0 | NC | NC |
| 2409 | 4018 | GTCTTGAACTCCTGACCTCA | NA | NC | NC | NC |
| 2410 | 4022 | GCTGGTCTTGAACTCCTGAC | NA | NC | NC | NC |
| 2411 | 4023 | GGCTGGTCTTGAACTCCTGA | NA | NC | NC | NC |
| 2412 | 4024 | AGGCTGGTCTTGAACTCCTG | NA | NC | NC | NC |
| 2413 | 4025 | CAGGCTGGTCTTGAACTCCT | NA | NC | NC | NC |
| 2414 | 4061 | ATATTTTTAGTAAAGATGGG | 0 | NC | NC | NC |
| 2415 | 4076 | GTAGAGATGTACTTTATATT | 2 | 2 | NC | NC |
| 2416 | 4077 | AGTAGAGATGTACTTTATAT | 2 | 2 | NC | NC |
| 2417 | 4078 | TAGTAGAGATGTACTTTATA | 2 | 2 | NC | NC |
| 2418 | 4079 | TTAGTAGAGATGTACTTTAT | 2 | 2 | NC | NC |
| 2419 | 4080 | TTTAGTAGAGATGTACTTTA | 2 | 1 | NC | NC |
| 2420 | 4081 | TTTTAGTAGAGATGTACTTT | 1 | 0 | NC | NC |
| 2421 | 4082 | TTTTTAGTAGAGATGTACTT | 1 | 0 | NC | NC |
| 2422 | 4083 | ATTTTTAGTAGAGATGTACT | 1 | 0 | NC | NC |
| 2423 | 4084 | TATTTTTAGTAGAGATGTAC | 1 | 0 | NC | NC |
| 2424 | 4085 | GTATTTTTAGTAGAGATGTA | 0 | 0 | NC | NC |
| 2425 | 4086 | CGTATTTTTAGTAGAGATGT | NA | NC | NC | NC |
| 2426 | 4087 | TCGTATTTTTAGTAGAGATG | NA | NC | NC | NC |
| 2427 | 4088 | TTCGTATTTTTAGTAGAGAT | NA | NC | NC | NC |
| 2428 | 4089 | TTTCGTATTTTTAGTAGAGA | NA | NC | NC | NC |
| 2429 | 4090 | TTTTCGTATTTTTAGTAGAG | NA | NC | NC | NC |
| 2430 | 4107 | ACCATGCCCAGCTAATTTTT | NA | NC | NC | NC |
| 2431 | 4108 | CACCATGCCCAGCTAATTTT | NA | NC | NC | NC |
| 2432 | 4109 | CCACCATGCCCAGCTAATTT | NA | NC | NC | NC |
| 2433 | 4110 | GCCACCATGCCCAGCTAATT | NA | NC | NC | NC |
| 2434 | 4160 | AAGAGATTCTCCTGCCTCAG | NA | 0 | NC | NC |
| 2435 | 4161 | CAAGAGATTCTCCTGCCTCA | NA | 0 | NC | NC |
| 2436 | 4162 | TCAAGAGATTCTCCTGCCTC | NA | 0 | NC | NC |
| 2437 | 4163 | TTCAAGAGATTCTCCTGCCT | NA | 0 | NC | NC |
| 2438 | 4164 | GTTCAAGAGATTCTCCTGCC | NA | 0 | NC | NC |
| 2439 | 4165 | GGTTCAAGAGATTCTCCTGC | NA | 0 | NC | NC |
| 2440 | 4166 | AGGTTCAAGAGATTCTCCTG | NA | 0 | NC | NC |
| 2441 | 4167 | CAGGTTCAAGAGATTCTCCT | NA | 0 | NC | NC |
| 2442 | 4168 | CCAGGTTCAAGAGATTCTCC | NA | 0 | NC | NC |
| 2443 | 4169 | CCCAGGTTCAAGAGATTCTC | NA | 0 | NC | NC |
| 2444 | 4170 | TCCCAGGTTCAAGAGATTCT | NA | 0 | NC | NC |
| 2445 | 4171 | CTCCCAGGTTCAAGAGATTC | NA | 0 | NC | NC |
| 2446 | 4172 | CCTCCCAGGTTCAAGAGATT | NA | 0 | NC | NC |
| 2447 | 4173 | GCCTCCCAGGTTCAAGAGAT | NA | NC | NC | NC |
| 2448 | 4201 | GACGTGATCTCGGCTCATTG | 0 | NC | NC | NC |
| 2449 | 4209 | AGTGCAGTGACGTGATCTCG | 0 | NC | NC | NC |
| 2450 | 4210 | GAGTGCAGTGACGTGATCTC | 0 | NC | NC | NC |
| 2451 | 4211 | GGAGTGCAGTGACGTGATCT | NA | NC | NC | NC |
| 2452 | 4212 | TGGAGTGCAGTGACGTGATC | NA | NC | NC | NC |
| 2453 | 4213 | CTGGAGTGCAGTGACGTGAT | NA | NC | NC | NC |
| 2454 | 4216 | AAGCTGGAGTGCAGTGACGT | 0 | NC | NC | NC |
| 2455 | 4232 | TCTTGCTCTGTTGCCCAAGC | 0 | NC | NC | NC |
| 2456 | 4233 | GTCTTGCTCTGTTGCCCAAG | 0 | NC | NC | NC |
| 2457 | 4234 | AGTCTTGCTCTGTTGCCCAA | NA | NC | NC | NC |
| 2458 | 4245 | TTTTGAGATGGAGTCTTGCT | NA | NC | NC | NC |
| 2459 | 4246 | TTTTTGAGATGGAGTCTTGC | NA | NC | NC | NC |
| 2460 | 4284 | GCTTGATAATTCTATTTCTT | 2 | 2 | NC | NC |
| 2461 | 4285 | AGCTTGATAATTCTATTTCT | 1 | 2 | NC | NC |
| 2462 | 4286 | AAGCTTGATAATTCTATTTC | 2 | 2 | NC | NC |
| 2463 | 4297 | CTAGTTTTTAAAAGCTTGAT | 2 | 2 | NC | NC |
| 2464 | 4298 | TCTAGTTTTTAAAAGCTTGA | 2 | NC | NC | NC |
| 2465 | 4299 | CTCTAGTTTTTAAAAGCTTG | 2 | NC | NC | NC |
| 2466 | 4300 | GCTCTAGTTTTTAAAAGCTT | 2 | NC | NC | NC |
| 2467 | 4301 | TGCTCTAGTTTTTAAAAGCT | 1 | NC | NC | NC |
| 2468 | 4302 | GTGCTCTAGTTTTTAAAAGC | 1 | NC | NC | NC |
| 2469 | 4303 | TGTGCTCTAGTTTTTAAAAG | 1 | NC | NC | NC |
| 2470 | 4304 | CTGTGCTCTAGTTTTTAAAA | 1 | NC | NC | NC |
| 2471 | 4305 | TCTGTGCTCTAGTTTTTAAA | 1 | NC | NC | NC |
| 2472 | 4306 | TTCTGTGCTCTAGTTTTTAA | 1 | NC | NC | NC |
| 2473 | 4307 | CTTCTGTGCTCTAGTTTTTA | 1 | NC | NC | NC |
| 2474 | 4308 | CCTTCTGTGCTCTAGTTTTT | 1 | NC | NC | NC |
| 2475 | 4309 | TCCTTCTGTGCTCTAGTTTT | 1 | NC | NC | NC |
| 2476 | 4310 | TTCCTTCTGTGCTCTAGTTT | 1 | NC | NC | NC |
| 2477 | 4311 | ATTCCTTCTGTGCTCTAGTT | 1 | NC | NC | NC |
| 2478 | 4312 | TATTCCTTCTGTGCTCTAGT | 1 | NC | NC | NC |
| 2479 | 4313 | TTATTCCTTCTGTGCTCTAG | 2 | NC | NC | NC |
| 2480 | 4314 | CTTATTCCTTCTGTGCTCTA | 2 | NC | NC | NC |
| 2481 | 4315 | CCTTATTCCTTCTGTGCTCT | 1 | NC | NC | NC |
| 2482 | 4316 | ACCTTATTCCTTCTGTGCTC | 2 | NC | NC | NC |
| 2483 | 4317 | GACCTTATTCCTTCTGTGCT | 2 | NC | NC | NC |
| 2484 | 4318 | TGACCTTATTCCTTCTGTGC | 2 | NC | NC | NC |
| 2485 | 4319 | ATGACCTTATTCCTTCTGTG | 2 | NC | NC | NC |
| 2486 | 4320 | CATGACCTTATTCCTTCTGT | 2 | NC | NC | NC |
| 2487 | 4321 | TCATGACCTTATTCCTTCTG | 2 | NC | NC | NC |
| 2488 | 4322 | TTCATGACCTTATTCCTTCT | 1 | NC | NC | NC |
| 2489 | 4323 | TTTCATGACCTTATTCCTTC | 2 | NC | NC | NC |
| 2490 | 4324 | ATTTCATGACCTTATTCCTT | 2 | NC | NC | NC |
| 2491 | 4325 | AATTTCATGACCTTATTCCT | 2 | NC | NC | NC |
| 2492 | 4326 | AAATTTCATGACCTTATTCC | 1 | NC | NC | NC |
| 2493 | 4327 | TAAATTTCATGACCTTATTC | 1 | 2 | NC | NC |
| 2494 | 4331 | CTTTTAAATTTCATGACCTT | 1 | NC | NC | NC |
| 2495 | 4332 | CCTTTTAAATTTCATGACCT | 2 | NC | NC | NC |
| 2496 | 4333 | ACCTTTTAAATTTCATGACC | 2 | NC | NC | NC |
| 2497 | 4334 | AACCTTTTAAATTTCATGAC | 2 | NC | NC | NC |
| 2498 | 4348 | CTATGACAATATTTAACCTT | 2 | NC | NC | NC |
| 2499 | 4349 | CCTATGACAATATTTAACCT | 2 | NC | NC | NC |
| 2500 | 4350 | TCCTATGACAATATTTAACC | 2 | NC | NC | NC |
| 2501 | 4351 | ATCCTATGACAATATTTAAC | 2 | NC | NC | NC |
| 2502 | 4355 | CTTAATCCTATGACAATATT | 2 | NC | NC | NC |
| 2503 | 4356 | GCTTAATCCTATGACAATAT | 2 | NC | NC | NC |
| 2504 | 4357 | TGCTTAATCCTATGACAATA | 2 | NC | NC | NC |
| 2505 | 4358 | CTGCTTAATCCTATGACAAT | 2 | NC | NC | NC |
| 2506 | 4359 | ACTGCTTAATCCTATGACAA | 2 | NC | NC | NC |
| 2507 | 4360 | AACTGCTTAATCCTATGACA | 2 | NC | NC | NC |
| 2508 | 4361 | AAACTGCTTAATCCTATGAC | 2 | NC | NC | NC |
| 2509 | 4362 | TAAACTGCTTAATCCTATGA | 2 | NC | NC | NC |
| 2510 | 4363 | TTAAACTGCTTAATCCTATG | 2 | NC | NC | NC |
| 2511 | 4364 | TTTAAACTGCTTAATCCTAT | 2 | NC | NC | NC |
| 2512 | 4365 | CTTTAAACTGCTTAATCCTA | 2 | NC | NC | NC |
| 2513 | 4366 | TCTTTAAACTGCTTAATCCT | 2 | 2 | NC | NC |
| 2514 | 4367 | ATCTTTAAACTGCTTAATCC | 2 | NC | NC | NC |
| 2515 | 4368 | AATCTTTAAACTGCTTAATC | 2 | NC | NC | NC |
| 2516 | 4369 | CAATCTTTAAACTGCTTAAT | 2 | NC | NC | NC |
| 2517 | 4370 | ACAATCTTTAAACTGCTTAA | 2 | NC | NC | NC |
| 2518 | 4371 | AACAATCTTTAAACTGCTTA | 2 | NC | NC | NC |
| 2519 | 4372 | CAACAATCTTTAAACTGCTT | 2 | NC | NC | NC |
| 2520 | 4373 | CCAACAATCTTTAAACTGCT | 2 | NC | NC | NC |
| 2521 | 4374 | TCCAACAATCTTTAAACTGC | 1 | NC | NC | NC |
| 2522 | 4375 | ATCCAACAATCTTTAAACTG | 2 | NC | NC | NC |
| 2523 | 4376 | CATCCAACAATCTTTAAACT | 2 | NC | NC | NC |
| 2524 | 4377 | TCATCCAACAATCTTTAAAC | 2 | NC | NC | NC |
| 2525 | 4378 | TTCATCCAACAATCTTTAAA | 2 | NC | NC | NC |
| 2526 | 4379 | TTTCATCCAACAATCTTTAA | 2 | NC | NC | NC |
| 2527 | 4380 | ATTTCATCCAACAATCTTTA | 2 | NC | NC | NC |
| 2528 | 4381 | AATTTCATCCAACAATCTTT | 2 | NC | NC | NC |
| 2529 | 4382 | TAATTTCATCCAACAATCTT | 1 | NC | NC | NC |
| 2530 | 4383 | ATAATTTCATCCAACAATCT | 2 | NC | NC | NC |
| 2531 | 4384 | AATAATTTCATCCAACAATC | 1 | NC | NC | NC |
| 2532 | 4386 | CAAATAATTTCATCCAACAA | 1 | NC | NC | NC |
| 2533 | 4387 | ACAAATAATTTCATCCAACA | 1 | NC | NC | NC |
| 2534 | 4388 | GACAAATAATTTCATCCAAC | 2 | NC | NC | NC |
| 2535 | 4389 | TGACAAATAATTTCATCCAA | 2 | 1 | NC | NC |
| 2536 | 4390 | ATGACAAATAATTTCATCCA | 2 | 1 | NC | NC |
| 2537 | 4391 | AATGACAAATAATTTCATCC | 2 | 2 | NC | NC |
| 2538 | 4392 | GAATGACAAATAATTTCATC | 2 | NC | NC | NC |
| 2539 | 4399 | CTTGAATGAATGACAAATAA | 1 | NC | NC | NC |
| 2540 | 4400 | ACTTGAATGAATGACAAATA | 2 | NC | NC | NC |
| 2541 | 4401 | TACTTGAATGAATGACAAAT | 2 | NC | NC | NC |
| 2542 | 4402 | TTACTTGAATGAATGACAAA | 1 | NC | NC | NC |
| 2543 | 4403 | ATTACTTGAATGAATGACAA | 2 | NC | NC | NC |
| 2544 | 4404 | TATTACTTGAATGAATGACA | 1 | NC | NC | NC |
| 2545 | 4405 | TTATTACTTGAATGAATGAC | 1 | NC | NC | NC |

### Example 2. Antisense Inhibition of MSH3

[0326] Inhibition or knockdown of MSH3 can be demonstrated using a cell-based assay. For example, HEK293, NIH3T3, or Hela or another available mammalian cell line with oligonucleotides targeting MSH3 identified above in Example 1 using at least five different dose levels, using transfection reagents such as lipofectamine 2000 (Invitrogen) following the manufacturer's instructions. Cells are harvested at multiple time points up to 7 days post transfection for either mRNA or protein analyses. Knockdown of mRNA and protein are determined by RT-qPCR or western blot analyses respectively, using standard molecular biology techniques as previously described (see, for example, as described in Drouet et al., 2014, PLOS One 9(6): e99341). The relative levels of the MSH3 mRNA and protein at the different oligonucleotide levels are compared with a mock oligonucleotide control. The most potent oligonucleotides (for example, those which are capable of at least 90% at least 95%, at least 97%, at least 98%, at or at least 99% or more, reduction in protein levels when compared with controls) are selected for subsequent studies, for example, as described in the examples below.

[0327] Human Cell Lines

[0328] HeLa cells were obtained from ATCC (ATCC in partnership with LGC Standards, Wesel, Germany, cat.# ATCC-CRM-CCL-2) and cultured in HAM's F12 (#FG0815, Biochrom, Berlin, Germany), supplemented to contain 10% fetal calf serum (1248D, Biochrom GmbH, Berlin, Germany), and 100 U/ml Penicillin/100 μg/ml Streptomycin (A2213, Biochrom GmbH, Berlin, Germany) at 37° C. in an atmosphere with 5% CO₂ in a humidified incubator. For transfection of HeLa cells with ASOs, cells were seeded at a density of 15,000 cells/well into 96-well tissue culture plates (#655180, GBO, Germany).

[0329] Transfections

[0330] In HeLa cells, transfection of ASOs was carried out with Lipofectamine 2000 (Invitrogen/Life Technologies, Karlsruhe, Germany) according to manufacturer's instructions for reverse transfection with 0.25 μL Lipofectamine 2000 per well.

[0331] The dual dose screen was performed with ASOs in quadruplicates at 20 nM and 2 nM, respectively, with two ASOs targeting AHSA1 (one MOE-ASO and one 2′oMe-ASO) as unspecific controls and a mock transfection. Dose-response experiments were done with ASOs in 5 concentrations transfected in quadruplicates, starting at 20 nM in 5-6-fold dilutions steps down to ˜15-32 μM. Mock transfected cells served as control in dose-response curve (DRC) experiments.

[0332] Analysis and Quantitation After 24 h of incubation with ASOs, medium was removed and cells were lysed in 150 μl Medium-Lysis Mixture (1 volume lysis mixture, 2 volumes cell culture medium) and then incubated at 53° C. for 30 minutes. bDNA assay was performed according to manufacturer's instructions. Luminescence was read using 1420 Luminescence Counter (WALLAC VICTOR Light, Perkin Elmer, Rodgau-Jügesheim, Germany) following 30 minutes incubation at RT in the dark.

[0333] The two Ahsa1-ASOs (one 2′-OMe and one MOE-modified) served at the same time as unspecific controls for respective target mRNA expression and as a positive control to analyze transfection efficiency with regards to Ahsa1 mRNA level. By hybridization with an Ahsa1 probeset, the mock transfected wells served as controls for Ahsa1 mRNA level. Transfection efficiency for each 96-well plate and both doses in the dual dose screen were calculated by relating Ahsa1-level with Ahsa1-ASO (normalized to GapDH) to Ahsa1-level obtained with mock controls.

[0334] For each well, the target mRNA level was normalized to the respective GAPDH mRNA level. The activity of a given ASO was expressed as percent mRNA concentration of the respective target (normalized to GAPDH mRNA) in treated cells, relative to the target mRNA concentration (normalized to GAPDH mRNA) averaged across control wells.

[0335] The results of the dual-dose screen of ˜480 ASOs targeting MSH3, as well as IC₂₀, IC₅₀ and IC₈₀ values of approximately 42 positive ASOs from the dual dose screen, are shown in Table 3 below.

TABLE 3

| | | mean % mRNA | SD % mRNA | | | |
|---|---|---|---|---|---|---|
| SEQ ID | Off-target Score | remaining | remaining | IC20 | IC50 | IC80 |

| NO | Position | Sequence | Human | Cyno | Mouse | Rat | 2 nM | 20 nM | 2 nM | 20 nM | (nM) | (nM) | (nM) |
|---|---|---|---|---|---|---|---|---|---|---|---|---|---|
| 20 | 158 | TTCCCGTAGACTGGAAGAAT | 2 | 2 | NC | NC | 30.06 | 24.97 | 3.97 | 1.36 | NA | NA | NA |
| 22 | 166 | TTTCAGGCTTCCCGTAGACT | 3 | 3 | NC | NC | 32.44 | 39.78 | 3.32 | 7.92 | NA | NA | NA |
| 23 | 167 | ATTTCAGGCTTCCCGTAGAC | 2 | 2 | NC | NC | 47.70 | 52.74 | 3.41 | 3.24 | NA | NA | NA |
| 24 | 168 | GATTTCAGGCTTCCCGTAGA | 2 | 2 | NC | NC | 43.01 | 51.58 | 2.43 | 2.46 | NA | NA | NA |
| 25 | 169 | GGATTTCAGGCTTCCCGTAG | 3 | 3 | NC | NC | 25.33 | 54.39 | 0.63 | 5.43 | NA | NA | NA |
| 26 | 170 | TGGATTTCAGGCTTCCCGTA | 2 | 2 | NC | NC | 25.24 | 35.58 | 4.01 | 3.13 | NA | NA | NA |
| 27 | 171 | GTGGATTTCAGGCTTCCCGT | 2 | 3 | NC | NC | 21.74 | 44.38 | 3.11 | 5.66 | NA | NA | NA |
| 28 | 173 | AGGTGGATTTCAGGCTTCCC | 2 | 3 | NC | NC | 22.86 | 29.47 | 3.63 | 1.81 | NA | NA | NA |
| 29 | 174 | GAGGTGGATTTCAGGCTTCC | 2 | 2 | NC | NC | 24.05 | 28.78 | 2.55 | 3.32 | NA | NA | NA |
| 31 | 176 | AGGAGGTGGATTTCAGGCTT | 2 | 2 | NC | NC | 31.37 | 42.25 | 7.19 | 6.92 | NA | NA | NA |
| 32 | 177 | GAGGAGGTGGATTTCAGGCT | 2 | 2 | NC | NC | 26.64 | 31.62 | 0.60 | 1.35 | NA | NA | NA |
| 77 | 358 | CTTTTTAACAGGCCCATCAT | 2 | 2 | NC | NC | 59.62 | 48.15 | 3.76 | 5.94 | NA | NA | NA |
| 78 | 359 | TCTTTTTAACAGGCCCATCA | 2 | 2 | NC | NC | 45.61 | 49.28 | 2.20 | 12.27 | NA | NA | NA |
| 81 | 362 | CTTTCTTTTTAACAGGCCCA | 2 | 2 | NC | NC | 22.04 | 18.27 | 2.73 | 4.55 | NA | NA | NA |
| 82 | 363 | ACTTTCTTTTTAACAGGCCC | 2 | 2 | NC | NC | 16.43 | 24.75 | 2.06 | 1.78 | NA | NA | NA |
| 114 | 400 | CAGATCACTTCCTCCTTCCT | 2 | 2 | NC | NC | 52.23 | 70.33 | 3.26 | 5.36 | NA | NA | NA |
| 115 | 401 | CCAGATCACTTCCTCCTTCC | 2 | 2 | NC | NC | 36.69 | 70.06 | 2.89 | 7.89 | NA | NA | NA |
| 117 | 403 | TCCCAGATCACTTCCTCCTT | 2 | 2 | NC | NC | 40.90 | 72.21 | 4.42 | 5.91 | NA | NA | NA |
| 118 | 404 | TTCCCAGATCACTTCCTCCT | 2 | 2 | NC | NC | 58.27 | 82.25 | 12.58 | 6.99 | NA | NA | NA |
| 120 | 406 | CATTCCCAGATCACTTCCTC | 2 | 2 | NC | NC | 82.15 | 101.53 | 8.33 | 18.80 | NA | NA | NA |
| 130 | 416 | AGTTGCCAGACATTCCCAGA | 2 | 2 | NC | NC | 28.37 | 36.19 | 3.13 | 2.95 | NA | NA | NA |
| 132 | 418 | AGAGTTGCCAGACATTCCCA | 2 | 2 | NC | NC | 34.75 | 60.80 | 4.42 | 3.63 | NA | NA | NA |
| 133 | 419 | CAGAGTTGCCAGACATTCCC | 2 | 2 | NC | NC | 21.81 | 40.77 | 0.55 | 4.31 | NA | NA | NA |
| 134 | 420 | TCAGAGTTGCCAGACATTCC | 2 | 2 | NC | NC | 25.37 | 37.98 | 2.10 | 7.04 | NA | NA | NA |
| 144 | 437 | TCAGACATTTCTTTGGCTCA | 2 | 2 | NC | NC | 25.10 | 34.55 | 3.26 | 5.27 | NA | NA | NA |
| 145 | 438 | CTCAGACATTTCTTTGGCTC | 2 | 2 | NC | NC | 11.87 | 27.07 | 0.98 | 18.87 | NA | NA | NA |
| 147 | 440 | TCCTCAGACATTTCTTTGGC | 2 | 2 | NC | NC | 12.32 | 19.35 | 0.96 | 1.47 | NA | NA | NA |
| 167 | 473 | TCAATTTTTCCAGAGACTTT | 2 | 2 | NC | NC | 47.74 | 79.79 | 9.49 | 3.67 | NA | NA | NA |
| 168 | 474 | TTCAATTTTTCCAGAGACTT | 2 | 2 | NC | NC | 35.67 | 65.30 | 7.37 | 7.81 | NA | NA | NA |
| 173 | 479 | ATTCTTTCAATTTTTCCAGA | 2 | 2 | NC | NC | 58.81 | 67.93 | 12.18 | 7.76 | NA | NA | NA |
| 210 | 562 | AGTACATTTTGGCAGAACTG | 2 | 2 | NC | NC | 14.38 | 34.64 | 1.54 | 3.66 | NA | NA | NA |
| 212 | 564 | TCAGTACATTTTGGCAGAAC | 2 | 2 | NC | NC | 24.12 | 21.13 | 3.41 | 1.47 | NA | NA | NA |
| 213 | 565 | ATCAGTACATTTTGGCAGAA | 2 | 2 | NC | NC | 23.76 | 33.72 | 7.51 | 2.12 | NA | NA | NA |
| 214 | 566 | AATCAGTACATTTTGGCAGA | 2 | 2 | NC | NC | 39.25 | 37.45 | 5.65 | 3.07 | NA | NA | NA |
| 215 | 567 | AAATCAGTACATTTTGGCAG | 2 | 2 | NC | NC | 20.31 | 20.26 | 2.66 | 1.32 | NA | NA | NA |
| 290 | 679 | TGATGATCCAAACTGACTGA | 2 | 2 | NC | NC | 26.26 | 21.63 | 2.50 | 0.77 | NA | NA | NA |
| 291 | 680 | TTGATGATCCAAACTGACTG | 2 | 2 | NC | NC | 27.04 | 24.63 | 0.80 | 2.66 | NA | NA | NA |
| 292 | 681 | TTTGATGATCCAAACTGACT | 2 | 2 | NC | NC | 32.31 | 27.81 | 2.68 | 5.91 | NA | NA | NA |
| 293 | 682 | ATTTGATGATCCAAACTGAC | 2 | 2 | NC | NC | 30.17 | 28.45 | 2.10 | 1.04 | NA | NA | NA |
| 295 | 684 | GTATTTGATGATCCAAACTG | 2 | 2 | NC | NC | 28.21 | 33.08 | 1.83 | 14.09 | NA | NA | NA |
| 296 | 685 | TGTATTTGATGATCCAAACT | 2 | 2 | NC | NC | 34.76 | 29.03 | 5.19 | 7.05 | NA | NA | NA |
| 299 | 689 | GACTTGTATTTGATGATCCA | 2 | 2 | NC | NC | 19.56 | 31.89 | 9.42 | 2.64 | NA | NA | NA |
| 300 | 690 | TGACTTGTATTTGATGATCC | 2 | 2 | NC | NC | 18.41 | 19.69 | 3.19 | 1.64 | NA | NA | NA |
| 301 | 691 | ATGACTTGTATTTGATGATC | 2 | 2 | NC | NC | 27.62 | 29.49 | 5.93 | 2.77 | NA | NA | NA |
| 302 | 692 | CATGACTTGTATTTGATGAT | 2 | 2 | NC | NC | 31.13 | 26.78 | 5.49 | 2.36 | NA | NA | NA |
| 303 | 693 | TCATGACTTGTATTTGATGA | 2 | 2 | NC | NC | 23.35 | 27.19 | 3.48 | 2.78 | NA | NA | NA |
| 304 | 694 | TTCATGACTTGTATTTGATG | 2 | 2 | NC | NC | 22.42 | 18.03 | 4.97 | 2.27 | NA | NA | NA |
| 305 | 695 | TTTCATGACTTGTATTTGAT | 2 | 2 | NC | NC | 36.78 | 45.87 | 12.49 | 10.13 | NA | NA | NA |
| 309 | 702 | TGTAAATTTTCATGACTTGT | 2 | 2 | NC | NC | 22.97 | 19.81 | 13.48 | 2.58 | NA | NA | NA |
| 351 | 765 | TGTAATTCTAGCGGCGTATA | 2 | 3 | NC | NC | 24.71 | 25.94 | 5.57 | 7.09 | NA | NA | NA |
| 352 | 766 | TTGTAATTCTAGCGGCGTAT | 3 | 3 | NC | NC | 19.28 | 12.68 | 1.64 | 1.02 | NA | NA | NA |
| 353 | 767 | ATTGTAATTCTAGCGGCGTA | 3 | 3 | NC | NC | 16.00 | 34.34 | 2.96 | 1.85 | NA | NA | NA |
| 354 | 768 | TATTGTAATTCTAGCGGCGT | 3 | 3 | NC | NC | 17.26 | 24.00 | 2.53 | 9.90 | NA | NA | NA |
| 355 | 769 | GTATTGTAATTCTAGCGGCG | 3 | 3 | NC | NC | 18.21 | 38.10 | 1.32 | 5.85 | NA | NA | NA |
| 356 | 770 | TGTATTGTAATTCTAGCGGC | 3 | 3 | NC | NC | 27.37 | 36.47 | 21.05 | 5.97 | NA | NA | NA |
| 357 | 771 | ATGTATTGTAATTCTAGCGG | 3 | 3 | NC | NC | 23.27 | 35.90 | 8.67 | 5.68 | NA | NA | NA |
| 358 | 772 | TATGTATTGTAATTCTAGCG | 2 | 2 | NC | NC | 20.35 | 29.01 | 5.26 | 4.90 | NA | NA | NA |
| 359 | 773 | CTATGTATTGTAATTCTAGC | 2 | 2 | NC | NC | 20.97 | 17.94 | 2.16 | 2.89 | NA | NA | NA |
| 361 | 781 | CTTCATTTCTATGTATTGTA | 2 | 2 | NC | NC | 27.17 | 48.73 | 3.43 | 8.15 | NA | NA | NA |
| 362 | 782 | GCTTCATTTCTATGTATTGT | 2 | 2 | NC | NC | 25.22 | 35.27 | 5.40 | 1.77 | NA | NA | NA |
| 365 | 785 | GCTGCTTCATTTCTATGTAT | 2 | 2 | NC | NC | 13.38 | 44.30 | 0.75 | 5.44 | NA | NA | NA |
| 366 | 786 | TGCTGCTTCATTTCTATGTA | 2 | 2 | NC | NC | 13.29 | 26.28 | 1.52 | 3.60 | NA | NA | NA |
| 368 | 788 | GCTGCTGCTTCATTTCTATG | 2 | 2 | NC | NC | 19.60 | 38.50 | 16.21 | 3.51 | NA | NA | NA |
| 407 | 879 | TAAATATTGAGCTCTCGGGC | 2 | 2 | NC | NC | 8.50 | 13.95 | 1.86 | 1.49 | 0.16 | 0.40 | 1.67 |
| 408 | 880 | ATAAATATTGAGCTCTCGGG | 2 | 2 | NC | NC | 12.35 | 14.43 | 2.49 | 0.95 | 0.07 | 0.35 | 2.29 |
| 409 | 881 | AATAAATATTGAGCTCTCGG | 2 | 2 | NC | NC | 17.73 | 21.81 | 3.28 | 2.89 | NA | NA | NA |
| 432 | 915 | ATACTTGCTGTCATAAAGTT | 2 | 2 | NC | NC | 23.32 | 27.35 | 3.55 | 2.60 | NA | NA | NA |
| 437 | 921 | GTAGGTATACTTGCTGTCAT | 2 | 2 | NC | NC | 19.95 | 28.11 | 4.07 | 7.40 | NA | NA | NA |
| 438 | 922 | AGTAGGTATACTTGCTGTCA | 2 | 2 | NC | NC | 19.44 | 47.18 | 6.70 | 1.53 | NA | NA | NA |
| 439 | 931 | CAGTCTGTGAGTAGGTATAC | 3 | 2 | NC | NC | 12.94 | 18.17 | 5.71 | 0.91 | NA | NA | NA |
| 440 | 932 | ACAGTCTGTGAGTAGGTATA | 2 | 2 | NC | NC | 11.65 | 26.21 | 0.91 | 0.40 | NA | NA | NA |
| 441 | 933 | AACAGTCTGTGAGTAGGTAT | 2 | 3 | NC | NC | 10.55 | 16.21 | 2.20 | 2.38 | 0.28 | 0.57 | 1.97 |
| 442 | 934 | AAACAGTCTGTGAGTAGGTA | 2 | 2 | NC | NC | 10.61 | 12.58 | 2.44 | 1.80 | 0.27 | 2.12 | 11.55 |
| 444 | 936 | ACAAACAGTCTGTGAGTAGG | 2 | 2 | NC | NC | 12.83 | 14.75 | 2.71 | 1.94 | 0.18 | 0.45 | 2.14 |
| 459 | 951 | AGGCGGCGTACATGAACAAA | 3 | 3 | NC | NC | 46.19 | 30.59 | 8.20 | 5.86 | NA | NA | NA |
| 460 | 952 | CAGGCGGCGTACATGAACAA | 3 | 3 | NC | NC | 43.41 | 21.98 | 7.88 | 2.01 | NA | NA | NA |
| 479 | 987 | TGCTTCACAACTCCCACCTT | 2 | 2 | 2 | 2 | 19.06 | 24.79 | 4.38 | 4.94 | NA | NA | NA |
| 482 | 990 | GTTTGCTTCACAACTCCCAC | 2 | 2 | 2 | 2 | 17.17 | 21.52 | 3.38 | 2.03 | NA | NA | NA |
| 483 | 991 | AGTTTGCTTCACAACTCCCA | 2 | 2 | 2 | 2 | 19.13 | 24.84 | 3.46 | 5.32 | NA | NA | NA |
| 484 | 992 | CAGTTTGCTTCACAACTCCC | 2 | 3 | 1 | 2 | 15.94 | 21.52 | 1.66 | 1.91 | NA | NA | NA |
| 485 | 993 | TCAGTTTGCTTCACAACTCC | 2 | 2 | 1 | 2 | 21.17 | 27.81 | 1.95 | 5.73 | NA | NA | NA |
| 486 | 994 | TTCAGTTTGCTTCACAACTC | 1 | 1 | 1 | 2 | 22.96 | 42.91 | 6.39 | 7.91 | NA | NA | NA |
| 487 | 995 | TTTCAGTTTGCTTCACAACT | 2 | 2 | 2 | 2 | 39.21 | 76.31 | 2.23 | 18.80 | NA | NA | NA |
| 488 | 996 | GTTTCAGTTTGCTTCACAAC | 2 | 2 | 2 | 2 | 21.50 | 31.61 | 2.03 | 4.52 | NA | NA | NA |
| 489 | 997 | AGTTTCAGTTTGCTTCACAA | 2 | 2 | 1 | 2 | 23.61 | 39.27 | 11.21 | 4.30 | NA | NA | NA |
| 490 | 998 | CAGTTTCAGTTTGCTTCACA | 2 | 2 | 1 | 1 | 29.78 | 50.09 | 3.60 | 13.00 | NA | NA | NA |
| 491 | 999 | GCAGTTTCAGTTTGCTTCAC | 2 | 2 | 1 | 2 | 19.62 | 34.41 | 1.57 | 4.47 | NA | NA | NA |
| 492 | 1004 | ATGCTGCAGTTTCAGTTTGC | 2 | 2 | NC | NC | 14.69 | 27.18 | 5.48 | 1.65 | NA | NA | NA |
| 493 | 1005 | AATGCTGCAGTTTCAGTTTG | 2 | 2 | NC | NC | 35.38 | 50.31 | 2.27 | 12.47 | NA | NA | NA |
| 497 | 1010 | CCTTTAATGCTGCAGTTTCA | 2 | 2 | NC | NC | 24.32 | 41.47 | 1.78 | 5.60 | NA | NA | NA |
| 498 | 1011 | GCCTTTAATGCTGCAGTTTC | 3 | 2 | NC | NC | 18.64 | 28.39 | 0.91 | 4.18 | NA | NA | NA |
| 500 | 1013 | TGGCCTTTAATGCTGCAGTT | 2 | 2 | NC | NC | 13.95 | 17.48 | 7.01 | 2.47 | NA | NA | NA |
| 501 | 1014 | ATGGCCTTTAATGCTGCAGT | 2 | 2 | NC | NC | 22.76 | 41.41 | 3.70 | 11.74 | NA | NA | NA |
| 503 | 1016 | CAATGGCCTTTAATGCTGCA | 2 | 2 | NC | NC | 20.09 | 22.88 | 1.78 | 6.09 | NA | NA | NA |
| 504 | 1017 | CCAATGGCCTTTAATGCTGC | 2 | 3 | NC | NC | 14.55 | 24.20 | 6.47 | 9.83 | NA | NA | NA |
| 505 | 1018 | TCCAATGGCCTTTAATGCTG | 2 | 2 | NC | NC | 19.49 | 18.66 | 4.15 | 5.64 | NA | NA | NA |
| 506 | 1019 | CTCCAATGGCCTTTAATGCT | 3 | 2 | NC | NC | 25.15 | 34.45 | 4.26 | 4.79 | NA | NA | NA |
| 507 | 1020 | TCTCCAATGGCCTTTAATGC | 2 | 2 | NC | NC | 43.44 | 66.75 | 13.44 | 15.71 | NA | NA | NA |
| 508 | 1021 | GTCTCCAATGGCCTTTAATG | 2 | 3 | NC | NC | 23.31 | 30.90 | 3.66 | 9.70 | NA | NA | NA |
| 509 | 1022 | TGTCTCCAATGGCCTTTAAT | 2 | 2 | NC | NC | 29.99 | 38.55 | 2.92 | 13.42 | NA | NA | NA |
| 510 | 1023 | TTGTCTCCAATGGCCTTTAA | 2 | 2 | NC | NC | 25.71 | 18.28 | 12.62 | 2.93 | NA | NA | NA |
| 511 | 1024 | GTTGTCTCCAATGGCCTTTA | 2 | 2 | NC | NC | 11.93 | 24.30 | 4.26 | 2.85 | NA | NA | NA |
| 512 | 1025 | TGTTGTCTCCAATGGCCTTT | 2 | 2 | NC | NC | 25.31 | 10.97 | 31.38 | 0.78 | NA | NA | NA |
| 543 | 1057 | GGCAGTCAATTTCCGGGAAA | 2 | 3 | NC | NC | 64.26 | 33.26 | 99.75 | 2.75 | NA | NA | NA |
| 544 | 1058 | GGGCAGTCAATTTCCGGGAA | 2 | 3 | NC | NC | 12.70 | 24.66 | 8.93 | 1.23 | NA | NA | NA |
| 545 | 1059 | AGGGCAGTCAATTTCCGGGA | 2 | 2 | NC | NC | 8.42 | 17.29 | 1.38 | 1.89 | 0.03 | 0.09 | 0.44 |
| 546 | 1060 | AAGGGCAGTCAATTTCCGGG | 2 | 2 | NC | NC | 9.58 | 23.44 | 0.73 | 6.88 | NA | NA | NA |
| 547 | 1061 | AAAGGGCAGTCAATTTCCGG | 2 | 2 | NC | NC | 12.65 | 27.02 | 0.95 | 2.17 | NA | NA | NA |
| 548 | 1062 | TAAAGGGCAGTCAATTTCCG | 2 | 3 | NC | NC | 83.92 | 15.94 | 133.95 | 2.40 | NA | NA | NA |
| 549 | 1063 | ATAAAGGGCAGTCAATTTCC | 2 | 2 | NC | NC | 26.77 | 37.76 | 5.76 | 10.21 | NA | NA | NA |
| 550 | 1064 | TATAAAGGGCAGTCAATTTC | 2 | 2 | NC | NC | 45.72 | 27.89 | 1.78 | 3.80 | NA | NA | NA |
| 551 | 1065 | GTATAAAGGGCAGTCAATTT | 2 | 2 | NC | NC | 94.84 | 121.02 | 10.78 | 9.88 | NA | NA | NA |
| 552 | 1066 | TGTATAAAGGGCAGTCAATT | 2 | 2 | NC | NC | 79.73 | 33.75 | 38.34 | 2.32 | NA | NA | NA |
| 553 | 1067 | TTGTATAAAGGGCAGTCAAT | 2 | 2 | NC | NC | 42.40 | 20.47 | 4.44 | 1.09 | NA | NA | NA |
| 554 | 1068 | TTTGTATAAAGGGCAGTCAA | 2 | 2 | NC | NC | 35.80 | 18.68 | 2.66 | 3.12 | NA | NA | NA |
| 555 | 1069 | TTTTGTATAAAGGGCAGTCA | 2 | 2 | NC | NC | 33.34 | 17.73 | 3.60 | 3.66 | NA | NA | NA |
| 556 | 1070 | ATTTTGTATAAAGGGCAGTC | 2 | 2 | NC | NC | 20.01 | 20.95 | 1.74 | 2.52 | NA | NA | NA |
| 557 | 1071 | GATTTTGTATAAAGGGCAGT | 2 | 2 | NC | NC | 26.22 | 38.90 | 1.73 | 3.61 | NA | NA | NA |
| 558 | 1072 | AGATTTTGTATAAAGGGCAG | 2 | 2 | NC | NC | 24.63 | 26.08 | 2.03 | 1.17 | NA | NA | NA |
| 559 | 1073 | TAGATTTTGTATAAAGGGCA | 2 | 2 | NC | NC | 34.94 | 32.54 | 2.53 | 3.19 | NA | NA | NA |
| 560 | 1074 | GTAGATTTTGTATAAAGGGC | 2 | 2 | NC | NC | 22.45 | 29.79 | 2.51 | 2.88 | NA | NA | NA |
| 561 | 1075 | TGTAGATTTTGTATAAAGGG | 2 | 2 | NC | NC | 60.77 | 51.45 | 6.24 | 4.07 | NA | NA | NA |
| 562 | 1076 | GTGTAGATTTTGTATAAAGG | 2 | 2 | NC | NC | 35.71 | 33.49 | 3.56 | 5.62 | NA | NA | NA |
| 563 | 1077 | AGTGTAGATTTTGTATAAAG | 2 | 2 | NC | NC | 68.25 | 60.14 | 4.25 | 5.39 | NA | NA | NA |
| 582 | 1117 | ATCATCCAGCTTGATTAGGG | 3 | 3 | NC | NC | 13.93 | 13.80 | 1.84 | 1.30 | 0.23 | 0.59 | 2.29 |
| 583 | 1118 | CATCATCCAGCTTGATTAGG | 2 | 2 | NC | NC | 19.44 | 15.57 | 1.05 | 2.57 | NA | NA | NA |
| 584 | 1119 | GCATCATCCAGCTTGATTAG | 2 | 3 | NC | NC | 16.80 | 35.91 | 2.64 | 3.38 | NA | NA | NA |
| 585 | 1120 | AGCATCATCCAGCTTGATTA | 2 | 2 | NC | NC | 20.33 | 30.80 | 8.01 | 2.56 | NA | NA | NA |
| 588 | 1129 | AACATTTACAGCATCATCCA | 2 | 2 | NC | NC | 40.28 | 69.60 | 3.82 | 13.68 | NA | NA | NA |
| 589 | 1130 | CAACATTTACAGCATCATCC | 2 | 2 | NC | NC | 25.71 | 65.14 | 2.21 | 17.75 | NA | NA | NA |
| 590 | 1131 | TCAACATTTACAGCATCATC | 2 | 2 | NC | NC | 38.63 | 79.78 | 2.77 | 3.39 | NA | NA | NA |
| 591 | 1132 | ATCAACATTTACAGCATCAT | 2 | 2 | NC | NC | 39.61 | 72.61 | 2.46 | 7.61 | NA | NA | NA |
| 598 | 1139 | TTATCTCATCAACATTTACA | 2 | 2 | NC | NC | 61.27 | 86.61 | 5.47 | 9.19 | NA | NA | NA |
| 603 | 1144 | AGTCATTATCTCATCAACAT | 2 | 2 | NC | NC | 20.98 | 40.74 | 5.43 | 9.81 | NA | NA | NA |
| 604 | 1145 | CAGTCATTATCTCATCAACA | 2 | 2 | NC | NC | 14.28 | 31.74 | 1.61 | 10.40 | NA | NA | NA |
| 611 | 1152 | GAAGTATCAGTCATTATCTC | 2 | 2 | NC | NC | 28.18 | 33.13 | 10.48 | 14.23 | NA | NA | NA |
| 613 | 1154 | TAGAAGTATCAGTCATTATC | 2 | 2 | NC | NC | 25.57 | 42.56 | 3.05 | 10.29 | NA | NA | NA |
| 614 | 1155 | GTAGAAGTATCAGTCATTAT | 2 | 2 | NC | NC | 29.00 | 33.44 | 5.21 | 9.86 | NA | NA | NA |
| 615 | 1156 | GGTAGAAGTATCAGTCATTA | 2 | 3 | NC | NC | 15.98 | 39.39 | 1.60 | 2.23 | NA | NA | NA |
| 616 | 1157 | TGGTAGAAGTATCAGTCATT | 2 | 2 | NC | NC | 13.05 | 15.05 | 1.39 | 3.61 | 0.12 | 0.51 | 2.41 |
| 659 | 1203 | TTGTCCCTAACATTTTCCTT | 2 | 2 | NC | NC | 19.61 | 43.69 | 3.69 | 10.29 | NA | NA | NA |
| 661 | 1205 | TTTTGTCCCTAACATTTTCC | 2 | 2 | NC | NC | 24.98 | 42.77 | 2.16 | 8.71 | NA | NA | NA |
| 699 | 1297 | TGAACGAGAAGCAGAGTCCT | 2 | 2 | NC | NC | 20.10 | 13.93 | 7.03 | 2.75 | NA | NA | NA |
| 700 | 1298 | CTGAACGAGAAGCAGAGTCC | 2 | 2 | NC | NC | 21.05 | 14.88 | 1.55 | 1.89 | NA | NA | NA |
| 702 | 1310 | GGGTTTCTAGCTCTGAACGA | 3 | 3 | NC | NC | 14.81 | 38.11 | 1.59 | 5.25 | NA | NA | NA |
| 705 | 1313 | TCCGGGTTTCTAGCTCTGAA | 2 | 2 | NC | NC | 8.72 | 12.58 | 1.33 | 1.55 | 0.13 | 0.38 | 8.72 |
| 706 | 1314 | ATCCGGGTTTCTAGCTCTGA | 2 | 2 | NC | NC | 8.41 | 13.64 | 1.27 | 1.53 | 0.04 | 0.21 | 1.43 |
| 707 | 1315 | CATCCGGGTTTCTAGCTCTG | 2 | 2 | NC | NC | 8.17 | 13.49 | 1.36 | 1.85 | 0.09 | 0.31 | 1.71 |
| 724 | 1395 | GATGTGGCTCTGTGGATGAG | 2 | 2 | NC | NC | 39.91 | 43.65 | 5.72 | 3.75 | NA | NA | NA |
| 725 | 1396 | AGATGTGGCTCTGTGGATGA | 2 | 2 | NC | NC | 41.36 | 53.60 | 7.68 | 10.44 | NA | NA | NA |
| 770 | 1470 | TGGAAAGCATGGCTGTATTC | 2 | 2 | 2 | 2 | 15.79 | 20.14 | 7.80 | 2.10 | NA | NA | NA |
| 771 | 1471 | CTGGAAAGCATGGCTGTATT | 1 | 2 | 2 | 2 | 15.31 | 15.99 | 2.42 | 1.07 | NA | NA | NA |
| 812 | 1520 | GAGAACCTTTGATGTCAACT | 2 | 2 | NC | NC | 16.84 | 34.79 | 2.00 | 3.80 | NA | NA | NA |
| 813 | 1521 | TGAGAACCTTTGATGTCAAC | 2 | 3 | NC | NC | 16.82 | 26.10 | 2.07 | 2.78 | NA | NA | NA |
| 814 | 1522 | TTGAGAACCTTTGATGTCAA | 2 | 2 | NC | NC | 15.39 | 19.95 | 0.70 | 6.17 | NA | NA | NA |
| 815 | 1523 | TTTGAGAACCTTTGATGTCA | 2 | 2 | NC | NC | 27.25 | 37.99 | 8.32 | 5.27 | NA | NA | NA |
| 816 | 1524 | ATTTGAGAACCTTTGATGTC | 2 | 2 | NC | NC | 23.08 | 35.38 | 4.24 | 4.05 | NA | NA | NA |
| 838 | 1546 | TAAGTTAACAATGCCAGAAA | 2 | 2 | NC | NC | 29.18 | 45.78 | 3.00 | 9.41 | NA | NA | NA |
| 839 | 1547 | CTAAGTTAACAATGCCAGAA | 2 | 2 | NC | NC | 14.39 | 19.14 | 1.15 | 1.44 | NA | NA | NA |
| 840 | 1548 | TCTAAGTTAACAATGCCAGA | 2 | 2 | NC | NC | 13.64 | 26.77 | 2.16 | 5.05 | NA | NA | NA |
| 841 | 1549 | CTCTAAGTTAACAATGCCAG | 2 | 2 | NC | NC | 9.38 | 17.85 | 1.13 | 4.30 | 0.04 | 0.23 | 1.88 |
| 842 | 1550 | TCTCTAAGTTAACAATGCCA | 2 | 2 | NC | NC | 13.09 | 33.96 | 1.05 | 8.54 | NA | NA | NA |
| 845 | 1553 | GCTTCTCTAAGTTAACAATG | 2 | 2 | NC | NC | 22.42 | 40.81 | 1.00 | 1.79 | NA | NA | NA |
| 846 | 1554 | GGCTTCTCTAAGTTAACAAT | 2 | 2 | NC | NC | 23.90 | 37.58 | 1.55 | 1.52 | NA | NA | NA |
| 847 | 1555 | AGGCTTCTCTAAGTTAACAA | 2 | 2 | NC | NC | 25.15 | 30.95 | 2.56 | 3.60 | NA | NA | NA |
| 848 | 1556 | CAGGCTTCTCTAAGTTAACA | 2 | 2 | NC | NC | 21.08 | 13.75 | 2.12 | 3.59 | NA | NA | NA |
| 849 | 1557 | ACAGGCTTCTCTAAGTTAAC | 2 | 2 | NC | NC | 22.83 | 31.48 | 2.74 | 1.92 | NA | NA | NA |
| 850 | 1558 | CACAGGCTTCTCTAAGTTAA | 2 | 2 | NC | NC | 23.12 | 34.35 | 4.05 | 4.67 | NA | NA | NA |
| 851 | 1559 | TCACAGGCTTCTCTAAGTTA | 2 | 2 | NC | NC | 29.38 | 46.70 | 2.38 | 5.97 | NA | NA | NA |
| 852 | 1560 | ATCACAGGCTTCTCTAAGTT | 2 | 2 | NC | NC | 37.59 | 47.94 | 2.35 | 7.39 | NA | NA | NA |
| 855 | 1563 | CAAATCACAGGCTTCTCTAA | 2 | 2 | NC | NC | 68.40 | 93.31 | 13.78 | 9.55 | NA | NA | NA |
| 856 | 1564 | GCAAATCACAGGCTTCTCTA | 2 | 2 | NC | NC | 24.37 | 31.77 | 5.94 | 4.88 | NA | NA | NA |
| 883 | 1593 | TTGAGGTATTTTATGATGGC | 2 | 2 | NC | NC | 19.16 | 31.84 | 2.64 | 4.39 | NA | NA | NA |
| 884 | 1594 | TTTGAGGTATTTTATGATGG | 2 | 2 | NC | NC | 30.45 | 48.27 | 4.12 | 5.65 | NA | NA | NA |
| 885 | 1595 | CTTTGAGGTATTTTATGATG | 2 | 2 | NC | NC | 26.53 | 23.68 | 3.37 | 5.69 | NA | NA | NA |
| 889 | 1600 | GAATTCTTTGAGGTATTTTA | 2 | 2 | NC | NC | 24.17 | 28.63 | 0.35 | 3.07 | NA | NA | NA |
| 893 | 1604 | AGTTGAATTCTTTGAGGTAT | 2 | 2 | NC | NC | 22.44 | 34.76 | 3.90 | 8.71 | NA | NA | NA |
| 894 | 1605 | AAGTTGAATTCTTTGAGGTA | 2 | 2 | NC | NC | 34.01 | 46.42 | 4.13 | 4.49 | NA | NA | NA |
| 895 | 1606 | CAAGTTGAATTCTTTGAGGT | 2 | 2 | NC | NC | 31.48 | 22.43 | 23.75 | 3.28 | NA | NA | NA |
| 896 | 1607 | CCAAGTTGAATTCTTTGAGG | 2 | 2 | NC | NC | 25.90 | 19.17 | 3.83 | 3.77 | NA | NA | NA |
| 897 | 1608 | TCCAAGTTGAATTCTTTGAG | 2 | 2 | NC | NC | 26.01 | 17.09 | 4.08 | 1.24 | NA | NA | NA |
| 900 | 1611 | TTTTCCAAGTTGAATTCTTT | 2 | 2 | NC | NC | 72.34 | 99.69 | 9.24 | 4.86 | NA | NA | NA |
| 936 | 1668 | GTCATAAATTCCATTTTACT | 2 | 2 | NC | NC | 19.32 | 40.31 | 3.36 | 5.48 | NA | NA | NA |
| 940 | 1680 | GTTCCATTAATTGTCATAAA | 2 | 2 | NC | NC | 16.14 | 33.06 | 0.56 | 1.18 | NA | NA | NA |
| 941 | 1681 | TGTTCCATTAATTGTCATAA | 2 | 2 | NC | NC | 32.89 | 51.92 | 2.28 | 5.56 | NA | NA | NA |
| 945 | 1685 | ATGTTGTTCCATTAATTGTC | 2 | 2 | NC | NC | 26.77 | 49.20 | 3.35 | 9.23 | NA | NA | NA |
| 948 | 1691 | TCCTTAATGTTGTTCCATTA | 2 | 2 | NC | NC | 37.79 | 79.84 | 5.05 | 9.09 | NA | NA | NA |
| 949 | 1693 | ATTCCTTAATGTTGTTCCAT | 2 | 2 | NC | NC | 53.10 | 103.25 | 6.35 | 20.66 | NA | NA | NA |
| 950 | 1694 | GATTCCTTAATGTTGTTCCA | 2 | 2 | NC | NC | 31.53 | 46.45 | 3.95 | 9.99 | NA | NA | NA |
| 955 | 1699 | TTCCAGATTCCTTAATGTTG | 2 | 2 | NC | NC | 37.91 | 75.62 | 3.39 | 18.66 | NA | NA | NA |
| 959 | 1703 | GGATTTCCAGATTCCTTAAT | 2 | 2 | NC | NC | 36.98 | 65.94 | 2.46 | 2.92 | NA | NA | NA |
| 960 | 1704 | AGGATTTCCAGATTCCTTAA | 2 | 2 | NC | NC | 35.62 | 62.15 | 3.70 | 2.11 | NA | NA | NA |
| 961 | 1705 | TAGGATTTCCAGATTCCTTA | 2 | 2 | NC | NC | 38.52 | 22.41 | 1.94 | 3.91 | NA | NA | NA |
| 965 | 1717 | AGTCTGATTCTGTAGGATTT | 2 | 2 | NC | NC | 19.85 | 35.08 | 2.05 | 1.84 | NA | NA | NA |
| 966 | 1718 | CAGTCTGATTCTGTAGGATT | 2 | 3 | NC | NC | 19.92 | 26.87 | 1.89 | 3.94 | NA | NA | NA |
| 967 | 1719 | TCAGTCTGATTCTGTAGGAT | 2 | 2 | NC | NC | 20.97 | 29.52 | 1.85 | 5.49 | NA | NA | NA |
| 968 | 1720 | ATCAGTCTGATTCTGTAGGA | 2 | 3 | NC | NC | 21.33 | 33.93 | 0.53 | 3.72 | NA | NA | NA |
| 972 | 1724 | TCATATCAGTCTGATTCTGT | 2 | 2 | NC | NC | 26.53 | 46.80 | 0.78 | 4.01 | NA | NA | NA |
| 973 | 1725 | TTCATATCAGTCTGATTCTG | 1 | 2 | 2 | 2 | 24.44 | 48.84 | 1.86 | 3.13 | NA | NA | NA |
| 998 | 1770 | GAAGTTTTAGTGTGGTCTAA | 2 | 2 | 2 | NC | 61.82 | 71.92 | 2.67 | 11.43 | NA | NA | NA |
| 999 | 1771 | TGAAGTTTTAGTGTGGTCTA | 2 | 2 | 2 | NC | 51.74 | 45.10 | 9.13 | 11.06 | NA | NA | NA |
| 1000 | 1772 | ATGAAGTTTTAGTGTGGTCT | 2 | 2 | 2 | NC | 53.70 | 53.39 | 8.43 | 12.09 | NA | NA | NA |
| 1007 | 1779 | CTCCCAAATGAAGTTTTAGT | 2 | 2 | 1 | NC | 46.87 | 75.13 | 6.37 | 23.97 | NA | NA | NA |
| 1008 | 1780 | TCTCCCAAATGAAGTTTTAG | 2 | 2 | 2 | NC | 54.23 | 78.26 | 6.39 | 22.53 | NA | NA | NA |
| 1016 | 1788 | AACTTCCGTCTCCCAAATGA | 2 | 2 | NC | NC | 48.29 | 64.35 | 3.86 | 20.38 | NA | NA | NA |
| 1017 | 1789 | TAACTTCCGTCTCCCAAATG | 2 | 2 | NC | NC | 45.46 | 70.65 | 5.54 | 18.54 | NA | NA | NA |
| 1019 | 1791 | TTTAACTTCCGTCTCCCAAA | 3 | 2 | NC | NC | 41.03 | 68.88 | 3.15 | 13.89 | NA | NA | NA |
| 1021 | 1793 | TCTTTAACTTCCGTCTCCCA | 3 | 2 | NC | NC | 45.70 | 77.67 | 3.35 | 12.15 | NA | NA | NA |
| 1022 | 1794 | TTCTTTAACTTCCGTCTCCC | 2 | 2 | NC | NC | 43.00 | 86.71 | 3.06 | 15.68 | NA | NA | NA |
| 1034 | 1819 | TTTAAGGAGTGGCTGGGTCA | 2 | 2 | NC | NC | 58.34 | 62.03 | 12.32 | 7.53 | NA | NA | NA |
| 1035 | 1820 | ATTTAAGGAGTGGCTGGGTC | 2 | 2 | NC | NC | 53.90 | 51.73 | 2.92 | 3.24 | NA | NA | NA |
| 1036 | 1821 | AATTTAAGGAGTGGCTGGGT | 2 | 2 | NC | NC | 68.88 | 48.51 | 4.89 | 5.09 | NA | NA | NA |
| 1040 | 1836 | GCATTTATTTCCCTTAATTT | 2 | 2 | 2 | NC | 47.93 | 46.43 | 9.49 | 5.50 | NA | NA | NA |
| 1041 | 1837 | GGCATTTATTTCCCTTAATT | 2 | 2 | 1 | NC | 20.55 | 32.67 | 2.58 | 2.25 | NA | NA | NA |
| 1042 | 1838 | GGGCATTTATTTCCCTTAAT | 2 | 1 | 1 | NC | 12.99 | 29.64 | 2.63 | 2.26 | NA | NA | NA |
| 1043 | 1839 | CGGGCATTTATTTCCCTTAA | 2 | 2 | 2 | NC | 11.77 | 17.60 | 2.40 | 5.52 | 0.06 | 0.22 | ND |
| 1044 | 1840 | CCGGGCATTTATTTCCCTTA | 2 | 2 | NC | NC | 12.67 | 13.81 | 1.92 | 1.24 | 0.02 | 0.12 | 1.19 |
| 1045 | 1841 | GCCGGGCATTTATTTCCCTT | 2 | 2 | NC | NC | 13.68 | 37.50 | 0.67 | 5.43 | NA | NA | NA |
| 1047 | 1844 | CAAGCCGGGCATTTATTTCC | 2 | 2 | NC | NC | 28.96 | 18.47 | 5.83 | 2.58 | NA | NA | NA |
| 1096 | 1913 | ATTTACGTAGATGATTTTCT | 2 | 2 | NC | NC | 53.08 | 52.94 | 5.84 | 3.65 | NA | NA | NA |
| 1170 | 2032 | AGGTATTATTGCTTGAAATT | 2 | 2 | NC | NC | 28.28 | 48.33 | 1.61 | 9.36 | NA | NA | NA |
| 1172 | 2034 | GCAGGTATTATTGCTTGAAA | 2 | 2 | NC | NC | 12.55 | 27.77 | 1.79 | 0.97 | NA | NA | NA |
| 1173 | 2041 | ATTAACAGCAGGTATTATTG | 2 | 2 | NC | NC | 48.21 | 62.50 | 5.76 | 11.58 | NA | NA | NA |
| 1211 | 2090 | CAGGAATTTCTAAAATAACG | 2 | 2 | NC | NC | 49.13 | 57.36 | 4.32 | 11.92 | NA | NA | NA |
| 1214 | 2094 | AGTTCAGGAATTTCTAAAAT | 2 | 2 | NC | NC | 79.03 | 91.21 | 6.69 | 8.43 | NA | NA | NA |
| 1216 | 2096 | GGAGTTCAGGAATTTCTAAA | 2 | 2 | NC | NC | 18.29 | 36.80 | 2.38 | 1.83 | NA | NA | NA |
| 1222 | 2113 | ATGCTCCACTGGACTGAGGA | 2 | 2 | NC | NC | 16.69 | 18.24 | 1.23 | 5.14 | NA | NA | NA |
| 1232 | 2123 | TCTTTAAGTAATGCTCCACT | 2 | 2 | NC | NC | 61.50 | 77.12 | 3.42 | 8.51 | NA | NA | NA |
| 1233 | 2124 | ATCTTTAAGTAATGCTCCAC | 2 | 2 | NC | NC | 51.63 | 71.96 | 2.70 | 2.75 | NA | NA | NA |
| 1235 | 2126 | GTATCTTTAAGTAATGCTCC | 2 | 2 | NC | NC | 31.68 | 25.10 | 1.93 | 8.80 | NA | NA | NA |
| 1239 | 2130 | TTGAGTATCTTTAAGTAATG | 2 | 2 | NC | NC | 51.48 | 85.95 | 11.45 | 18.61 | NA | NA | NA |
| 1240 | 2132 | CATTGAGTATCTTTAAGTAA | 2 | 2 | NC | NC | 48.01 | 46.09 | 5.81 | 4.38 | NA | NA | NA |
| 1241 | 2133 | TCATTGAGTATCTTTAAGTA | 2 | 2 | NC | NC | 42.00 | 38.76 | 5.01 | 5.01 | NA | NA | NA |
| 1242 | 2134 | TTCATTGAGTATCTTTAAGT | 2 | 2 | NC | NC | 38.54 | 40.10 | 1.83 | 5.16 | NA | NA | NA |
| 1244 | 2136 | TGTTCATTGAGTATCTTTAA | 2 | 2 | NC | NC | 36.89 | 28.49 | 4.46 | 6.15 | NA | NA | NA |
| 1245 | 2137 | TTGTTCATTGAGTATCTTTA | 2 | 2 | NC | NC | 32.83 | 36.71 | 3.31 | 7.84 | NA | NA | NA |
| 1246 | 2138 | CTTGTTCATTGAGTATCTTT | 2 | 2 | NC | NC | 23.96 | 19.15 | 2.75 | 4.55 | NA | NA | NA |
| 1247 | 2139 | GCTTGTTCATTGAGTATCTT | 2 | 2 | NC | NC | 19.12 | 40.62 | 1.95 | 6.61 | NA | NA | NA |
| 1248 | 2140 | AGCTTGTTCATTGAGTATCT | 2 | 2 | NC | NC | 16.10 | 24.45 | 0.87 | 4.66 | NA | NA | NA |
| 1249 | 2141 | CAGCTTGTTCATTGAGTATC | 2 | 2 | NC | NC | 15.53 | 18.08 | 2.34 | 2.37 | NA | NA | NA |
| 1251 | 2143 | GGCAGCTTGTTCATTGAGTA | 2 | 2 | NC | NC | 21.08 | 38.35 | 4.02 | 3.26 | NA | NA | NA |
| 1252 | 2144 | TGGCAGCTTGTTCATTGAGT | 2 | 3 | NC | NC | 22.01 | 19.89 | 3.22 | 2.62 | 0.07 | 0.24 | ND |
| 1254 | 2146 | TTTGGCAGCTTGTTCATTGA | 2 | 2 | NC | NC | 35.31 | 24.10 | 12.62 | 3.80 | NA | NA | NA |
| 1255 | 2147 | CTTTGGCAGCTTGTTCATTG | 2 | 2 | NC | NC | 26.81 | 10.55 | 6.01 | 1.36 | 0.07 | 0.26 | 1.63 |
| 1256 | 2148 | ACTTTGGCAGCTTGTTCATT | 2 | 2 | NC | NC | 44.60 | 38.11 | 6.07 | 6.73 | NA | NA | NA |
| 1257 | 2149 | AACTTTGGCAGCTTGTTCAT | 2 | 2 | NC | NC | 46.26 | 27.82 | 10.50 | 3.03 | NA | NA | NA |
| 1258 | 2150 | CAACTTTGGCAGCTTGTTCA | 2 | 2 | NC | NC | 36.21 | 15.35 | 5.88 | 2.61 | NA | NA | NA |
| 1259 | 2162 | CAGTTTTATCCCCAACTTTG | 2 | 2 | NC | NC | 27.53 | 23.74 | 5.12 | 3.44 | NA | NA | NA |
| 1268 | 2177 | GGTCTTTAAATAATTCAGTT | 2 | 2 | NC | NC | 20.61 | 27.40 | 3.96 | 3.35 | 0.13 | 0.41 | ND |
| 1316 | 2265 | TTTCGTATTTCTTGCAAATG | 2 | 2 | NC | NC | 37.10 | 41.93 | 5.75 | 10.06 | NA | NA | NA |
| 1318 | 2267 | TTTTTCGTATTTCTTGCAAA | 2 | 2 | NC | NC | 52.26 | 31.85 | 10.93 | 1.81 | NA | NA | NA |
| 1319 | 2268 | ATTTTTCGTATTTCTTGCAA | 2 | 2 | NC | NC | 39.03 | 20.85 | 10.26 | 2.62 | NA | NA | NA |
| 1320 | 2269 | TATTTTTCGTATTTCTTGCA | 2 | 2 | NC | NC | 47.22 | 45.11 | 9.89 | 3.25 | NA | NA | NA |
| 1321 | 2270 | GTATTTTTCGTATTTCTTGC | 2 | 2 | NC | NC | 20.41 | 20.13 | 2.93 | 3.87 | 0.05 | 0.23 | 1.25 |
| 1322 | 2271 | AGTATTTTTCGTATTTCTTG | 2 | 2 | NC | NC | 39.26 | 27.58 | 5.11 | 4.16 | NA | NA | NA |
| 1328 | 2307 | CCTGATACTGTCACATATTG | 2 | 2 | NC | NC | 55.01 | 32.97 | 9.75 | 5.81 | NA | NA | NA |
| 1329 | 2308 | TCCTGATACTGTCACATATT | 2 | 2 | NC | NC | 52.74 | 42.90 | 5.89 | 4.78 | NA | NA | NA |
| 1373 | 2374 | AACCTTTACCCAATCAGTTG | 3 | 2 | NC | NC | 47.07 | 34.37 | 6.35 | 5.00 | NA | NA | NA |
| 1374 | 2375 | CAACCTTTACCCAATCAGTT | 2 | 2 | NC | NC | 44.40 | 67.92 | 15.96 | 9.89 | NA | NA | NA |
| 1375 | 2376 | CCAACCTTTACCCAATCAGT | 2 | 2 | NC | NC | 45.07 | 67.35 | 4.71 | 13.26 | NA | NA | NA |
| 1376 | 2377 | TCCAACCTTTACCCAATCAG | 2 | 2 | NC | NC | 64.01 | 68.26 | 9.83 | 13.95 | NA | NA | NA |
| 1377 | 2378 | TTCCAACCTTTACCCAATCA | 2 | 2 | NC | NC | 71.45 | 74.59 | 18.83 | 13.07 | NA | NA | NA |
| 1378 | 2379 | CTTCCAACCTTTACCCAATC | 2 | 2 | NC | NC | 59.21 | 56.53 | 14.56 | 15.52 | NA | NA | NA |
| 1379 | 2380 | GCTTCCAACCTTTACCCAAT | 2 | 2 | NC | NC | 45.57 | 31.39 | 21.69 | 8.62 | NA | NA | NA |
| 1380 | 2381 | TGCTTCCAACCTTTACCCAA | 2 | 2 | NC | NC | 55.11 | 23.26 | 12.44 | 8.05 | NA | NA | NA |
| 1381 | 2382 | GTGCTTCCAACCTTTACCCA | 2 | 2 | NC | NC | 45.92 | 28.32 | 13.54 | 4.29 | NA | NA | NA |
| 1382 | 2383 | TGTGCTTCCAACCTTTACCC | 2 | 2 | NC | NC | 35.78 | 30.38 | 8.52 | 3.88 | NA | NA | NA |
| 1383 | 2384 | TTGTGCTTCCAACCTTTACC | 2 | 2 | NC | NC | 61.02 | 38.15 | 15.49 | 8.42 | NA | NA | NA |
| 1386 | 2387 | CTTTTGTGCTTCCAACCTTT | 2 | 2 | NC | NC | 51.63 | 28.91 | 14.78 | 5.58 | NA | NA | NA |
| 1387 | 2388 | GCTTTTGTGCTTCCAACCTT | 1 | 2 | 2 | 2 | 42.27 | 23.42 | 20.49 | 3.09 | NA | NA | NA |
| 1407 | 2435 | GATGTCTGTAATTTTCTACA | 2 | 2 | NC | NC | 42.27 | 43.98 | 3.38 | 9.09 | NA | NA | NA |
| 1408 | 2436 | AGATGTCTGTAATTTTCTAC | 2 | 2 | NC | NC | 42.86 | 29.19 | 6.25 | 3.78 | NA | NA | NA |
| 1427 | 2491 | AAAATCAAGCCATTCAGCAC | 2 | 2 | NC | NC | 101.49 | 73.07 | 11.62 | 7.85 | NA | NA | NA |
| 1433 | 2497 | CTCTAGAAAATCAAGCCATT | 2 | 2 | NC | NC | 37.31 | 22.56 | 1.98 | 3.80 | NA | NA | NA |
| 1434 | 2498 | TCTCTAGAAAATCAAGCCAT | 2 | 2 | NC | NC | 31.11 | 26.43 | 10.17 | 5.34 | NA | NA | NA |
| 1435 | 2499 | TTCTCTAGAAAATCAAGCCA | 2 | 2 | NC | NC | 41.92 | 29.52 | 5.61 | 5.70 | NA | NA | NA |
| 1450 | 2542 | GTGATGCACTGCTTTACACA | 2 | 2 | NC | NC | 27.37 | 23.56 | 2.70 | 2.65 | NA | NA | NA |
| 1451 | 2543 | GGTGATGCACTGCTTTACAC | 2 | 2 | NC | NC | 18.24 | 27.08 | 1.20 | 3.69 | 0.15 | 0.45 | 1.49 |
| 1454 | 2546 | CTAGGTGATGCACTGCTTTA | 2 | 2 | NC | NC | 19.72 | 4.95 | 2.00 | 0.28 | 0.08 | 0.27 | 1.10 |
| 1455 | 2547 | GCTAGGTGATGCACTGCTTT | 2 | 2 | NC | NC | 15.25 | 13.19 | 12.00 | 1.18 | 0.06 | 0.18 | 0.88 |
| 1456 | 2548 | TGCTAGGTGATGCACTGCTT | 2 | 2 | NC | NC | 8.73 | 11.44 | 0.93 | 3.02 | 0.03 | 0.25 | 2.06 |
| 1457 | 2555 | CAACAGTTGCTAGGTGATGC | 2 | 2 | NC | NC | 23.09 | 14.17 | 3.60 | 2.89 | 0.37 | 0.73 | 2.61 |
| 1458 | 2556 | TCAACAGTTGCTAGGTGATG | 2 | 2 | NC | NC | 25.90 | 17.87 | 2.81 | 1.52 | 0.04 | 0.30 | 3.21 |
| 1459 | 2557 | GTCAACAGTTGCTAGGTGAT | 2 | 2 | 1 | NC | 21.74 | 17.34 | 3.10 | 2.04 | 0.19 | 0.67 | ND |
| 1460 | 2558 | AGTCAACAGTTGCTAGGTGA | 2 | 2 | 1 | NC | 27.41 | 21.03 | 7.21 | 1.14 | 0.13 | 0.61 | 15.80 |
| 1461 | 2559 | CAGTCAACAGTTGCTAGGTG | 2 | 2 | 1 | NC | 26.55 | 25.31 | 7.23 | 4.23 | NA | NA | NA |
| 1476 | 2590 | TTGCTTAGCGACCTTGGCCA | 2 | 2 | NC | NC | 55.38 | 15.90 | 32.59 | 2.50 | NA | NA | NA |
| 1477 | 2593 | TCCTTGCTTAGCGACCTTGG | 2 | 2 | NC | NC | 41.61 | 12.54 | 9.35 | 4.32 | NA | NA | NA |
| 1496 | 2622 | TCTTCTTGTACAGTTGGTCT | 2 | 2 | NC | NC | 32.56 | 29.70 | 10.48 | 7.68 | NA | NA | NA |
| 1497 | 2623 | TTCTTCTTGTACAGTTGGTC | 2 | 2 | NC | NC | 20.80 | 17.03 | 5.21 | 3.06 | 0.27 | 0.63 | 2.04 |
| 1498 | 2624 | TTTCTTCTTGTACAGTTGGT | 2 | 2 | NC | NC | 29.53 | 13.66 | 9.50 | 2.56 | 0.03 | 0.25 | 2.13 |
| 1499 | 2625 | CTTTCTTCTTGTACAGTTGG | 2 | 2 | NC | NC | 22.83 | 9.13 | 4.31 | 0.69 | 0.18 | 0.52 | ND |
| 1532 | 2682 | TGTTCTCCCAGCAACACATC | 2 | 2 | NC | NC | 47.46 | 27.14 | 15.61 | 6.25 | NA | NA | NA |
| 1538 | 2688 | TGATCCTGTTCTCCCAGCAA | 2 | 2 | NC | NC | 24.66 | 7.17 | 4.41 | 1.88 | 0.08 | 0.36 | 1.68 |
| 1539 | 2689 | TTGATCCTGTTCTCCCAGCA | 2 | 2 | NC | NC | 19.33 | 10.62 | 2.91 | 4.26 | 0.05 | 0.25 | 1.49 |
| 1540 | 2690 | ATTGATCCTGTTCTCCCAGC | 2 | 2 | NC | NC | 31.91 | 22.82 | 16.29 | 6.38 | NA | NA | NA |
| 1541 | 2691 | TATTGATCCTGTTCTCCCAG | 2 | 2 | NC | NC | 42.07 | 33.37 | 6.78 | 5.96 | NA | NA | NA |
| 1542 | 2692 | ATATTGATCCTGTTCTCCCA | 2 | 2 | NC | NC | 53.44 | 53.86 | 6.38 | 3.85 | NA | NA | NA |
| 1543 | 2693 | CATATTGATCCTGTTCTCCC | 2 | 2 | NC | NC | 64.40 | 68.94 | 7.59 | 8.23 | NA | NA | NA |
| 1544 | 2694 | ACATATTGATCCTGTTCTCC | 2 | 2 | NC | NC | 82.01 | 70.33 | 16.88 | 6.35 | NA | NA | NA |
| 1565 | 2730 | CTCTCTGAGTCCTCTGATAA | 2 | 2 | NC | NC | 42.55 | 23.58 | 4.51 | 3.32 | NA | NA | NA |
| 1566 | 2731 | TCTCTCTGAGTCCTCTGATA | 2 | 2 | NC | NC | 36.03 | 29.18 | 5.36 | 7.30 | NA | NA | NA |
| 1568 | 2742 | ATTATCATTACTCTCTCTGA | 2 | 2 | NC | NC | 61.55 | 59.56 | 12.39 | 11.34 | NA | NA | NA |
| 1569 | 2743 | AATTATCATTACTCTCTCTG | 2 | 2 | NC | NC | 50.91 | 71.82 | 8.91 | 31.14 | NA | NA | NA |
| 1579 | 2770 | GCTCTTTCCACCCATGTTTG | 2 | 2 | NC | NC | 27.13 | 22.73 | 3.88 | 8.89 | NA | NA | NA |
| 1581 | 2772 | GAGCTCTTTCCACCCATGTT | 2 | 2 | NC | NC | 21.28 | 13.11 | 3.94 | 0.74 | 0.07 | 0.15 | 1.15 |
| 1582 | 2773 | GGAGCTCTTTCCACCCATGT | 2 | 2 | NC | NC | 13.33 | 17.05 | 1.66 | 2.62 | 0.05 | 0.10 | ND |
| 1583 | 2782 | TTTTATGTAGGAGCTCTTTC | 2 | 2 | NC | NC | 61.29 | 41.99 | 13.48 | 12.94 | NA | NA | NA |
| 1584 | 2783 | GTTTTATGTAGGAGCTCTTT | 2 | 2 | NC | NC | 44.03 | 19.45 | 7.88 | 2.33 | NA | NA | NA |
| 1585 | 2784 | TGTTTTATGTAGGAGCTCTT | 2 | 2 | NC | NC | 47.18 | 21.48 | 3.54 | 3.10 | NA | NA | NA |
| 1586 | 2785 | TTGTTTTATGTAGGAGCTCT | 2 | 2 | NC | NC | 42.62 | 16.00 | 3.79 | 1.17 | NA | NA | NA |
| 1587 | 2786 | CTTGTTTTATGTAGGAGCTC | 3 | 3 | NC | NC | 26.47 | 17.43 | 2.23 | 3.41 | 0.05 | 0.25 | 1.91 |
| 1588 | 2787 | ACTTGTTTTATGTAGGAGCT | 2 | 2 | NC | NC | 29.82 | 20.90 | 2.38 | 3.99 | NA | NA | NA |
| 1589 | 2788 | AACTTGTTTTATGTAGGAGC | 2 | 2 | NC | NC | 40.86 | 21.42 | 8.58 | 3.85 | NA | NA | NA |
| 1590 | 2789 | CAACTTGTTTTATGTAGGAG | 2 | 2 | NC | NC | 58.69 | 57.40 | 6.17 | 5.46 | NA | NA | NA |
| 1591 | 2790 | GCAACTTGTTTTATGTAGGA | 2 | 2 | NC | NC | 25.04 | 23.92 | 3.31 | 8.78 | NA | NA | NA |
| 1594 | 2793 | AATGCAACTTGTTTTATGTA | 2 | 2 | NC | NC | 72.20 | 69.11 | 9.11 | 6.88 | NA | NA | NA |
| 1597 | 2796 | ATCAATGCAACTTGTTTTAT | 2 | 2 | NC | NC | 85.81 | 95.46 | 9.79 | 10.59 | NA | NA | NA |
| 1600 | 2799 | GTAATCAATGCAACTTGTTT | 2 | 2 | NC | NC | 51.51 | 41.06 | 21.54 | 5.60 | NA | NA | NA |
| 1601 | 2800 | GGTAATCAATGCAACTTGTT | 2 | 2 | NC | NC | 24.57 | 22.71 | 2.39 | 1.25 | 0.13 | 0.37 | ND |
| 1602 | 2801 | TGGTAATCAATGCAACTTGT | 2 | 2 | NC | NC | 21.39 | 20.55 | 2.20 | 5.18 | 0.05 | 0.22 | 1.41 |
| 1603 | 2802 | ATGGTAATCAATGCAACTTG | 2 | 2 | NC | NC | 28.82 | 22.62 | 2.65 | 6.53 | NA | NA | NA |
| 1604 | 2803 | GATGGTAATCAATGCAACTT | 2 | 2 | NC | NC | 34.01 | 28.75 | 4.52 | 2.73 | NA | NA | NA |
| 1605 | 2804 | TGATGGTAATCAATGCAACT | 2 | 2 | NC | NC | 43.81 | 33.91 | 4.91 | 5.35 | NA | NA | NA |
| 1606 | 2819 | AGCCAATCTGAGCCATGATG | 2 | 2 | 2 | NC | 19.96 | 12.26 | 3.24 | 1.31 | 0.07 | 0.27 | 3.67 |
| 1607 | 2820 | GAGCCAATCTGAGCCATGAT | 2 | 2 | 2 | NC | 23.76 | 14.02 | 9.32 | 0.30 | 0.05 | 0.31 | 3.71 |
| 1610 | 2823 | TAGGAGCCAATCTGAGCCAT | 2 | 2 | 2 | NC | 20.83 | 11.89 | 4.80 | 1.26 | 0.10 | 0.35 | 1.90 |
| 1625 | 2838 | TCTTCTGCAGGAACATAGGA | 2 | 2 | NC | NC | 50.65 | 19.34 | 7.07 | 2.32 | NA | NA | NA |
| 1627 | 2840 | CTTCTTCTGCAGGAACATAG | 2 | 2 | NC | NC | 51.09 | 20.35 | 5.80 | 2.45 | NA | NA | NA |
| 1628 | 2841 | GCTTCTTCTGCAGGAACATA | 2 | 2 | NC | NC | 35.57 | 19.49 | 3.46 | 1.81 | NA | NA | NA |
| 1629 | 2842 | CGCTTCTTCTGCAGGAACAT | 2 | 2 | NC | NC | 39.30 | 20.59 | 7.46 | 2.38 | NA | NA | NA |
| 1631 | 2844 | GTCGCTTCTTCTGCAGGAAC | 2 | 2 | NC | NC | 19.48 | 14.60 | 1.86 | 1.86 | 0.03 | 0.16 | 1.58 |
| 1632 | 2845 | TGTCGCTTCTTCTGCAGGAA | 2 | 2 | NC | NC | 21.76 | 13.58 | 1.40 | 1.13 | 0.06 | 0.28 | 7.37 |
| 1633 | 2846 | TTGTCGCTTCTTCTGCAGGA | 2 | 2 | NC | NC | 26.21 | 13.75 | 8.35 | 2.95 | 0.08 | 0.28 | 1.61 |
| 1634 | 2847 | ATTGTCGCTTCTTCTGCAGG | 2 | 2 | NC | NC | 40.04 | 17.98 | 2.96 | 5.57 | NA | NA | NA |
| 1635 | 2848 | AATTGTCGCTTCTTCTGCAG | 2 | 2 | NC | NC | 46.92 | 20.59 | 3.14 | 1.18 | NA | NA | NA |
| 1636 | 2849 | CAATTGTCGCTTCTTCTGCA | 2 | 2 | NC | NC | 44.66 | 17.42 | 2.95 | 3.88 | NA | NA | NA |
| 1637 | 2850 | CCAATTGTCGCTTCTTCTGC | 2 | 3 | NC | NC | 41.59 | 19.68 | 3.88 | 3.23 | NA | NA | NA |
| 1638 | 2851 | CCCAATTGTCGCTTCTTCTG | 2 | 2 | NC | NC | 32.04 | 26.69 | 11.53 | 5.23 | NA | NA | NA |
| 1639 | 2852 | TCCCAATTGTCGCTTCTTCT | 2 | 2 | NC | NC | 41.35 | 44.29 | 1.88 | 9.55 | NA | NA | NA |
| 1640 | 2853 | ATCCCAATTGTCGCTTCTTC | 2 | 3 | NC | NC | 65.20 | 70.02 | 13.92 | 11.22 | NA | NA | NA |
| 1643 | 2864 | TGCCATCCACAATCCCAATT | 2 | 2 | 2 | NC | 41.83 | 48.79 | 13.98 | 7.95 | NA | NA | NA |
| 1644 | 2865 | ATGCCATCCACAATCCCAAT | 2 | 2 | 2 | NC | 63.97 | 52.82 | 8.09 | 14.01 | NA | NA | NA |
| 1645 | 2866 | AATGCCATCCACAATCCCAA | 1 | 1 | 2 | NC | 59.66 | 67.08 | 13.70 | 12.42 | NA | NA | NA |
| 1646 | 2867 | AAATGCCATCCACAATCCCA | 1 | 1 | 2 | NC | 78.71 | 76.59 | 22.83 | 16.29 | NA | NA | NA |
| 1647 | 2868 | AAAATGCCATCCACAATCCC | 2 | 2 | 2 | NC | 93.25 | 110.00 | 18.07 | 33.29 | NA | NA | NA |
| 1648 | 2869 | GAAAATGCCATCCACAATCC | 2 | 2 | 1 | NC | 90.33 | 100.23 | 17.01 | 18.40 | NA | NA | NA |
| 1649 | 2870 | TGAAAATGCCATCCACAATC | 2 | 2 | 1 | NC | 113.95 | 103.92 | 65.68 | 21.09 | NA | NA | NA |
| 1650 | 2871 | GTGAAAATGCCATCCACAAT | 2 | 2 | 2 | NC | 45.14 | 32.65 | 7.68 | 5.98 | NA | NA | NA |
| 1651 | 2872 | TGTGAAAATGCCATCCACAA | 1 | 1 | 2 | NC | 40.78 | 19.87 | 9.71 | 2.27 | NA | NA | NA |
| 1652 | 2873 | TTGTGAAAATGCCATCCACA | 1 | 1 | 2 | NC | 44.41 | 19.62 | 5.40 | 3.76 | NA | NA | NA |
| 1653 | 2874 | CTTGTGAAAATGCCATCCAC | 1 | 1 | 2 | NC | 48.65 | 24.91 | 1.73 | 8.71 | NA | NA | NA |
| 1654 | 2875 | CCTTGTGAAAATGCCATCCA | 1 | 1 | 2 | NC | 40.26 | 26.83 | 3.89 | 7.25 | NA | NA | NA |
| 1655 | 2876 | TCCTTGTGAAAATGCCATCC | 2 | 2 | 2 | NC | 32.86 | 39.36 | 2.21 | 11.81 | NA | NA | NA |
| 1656 | 2877 | ATCCTTGTGAAAATGCCATC | 2 | 2 | 1 | NC | 46.43 | 75.07 | 7.64 | 13.35 | NA | NA | NA |
| 1657 | 2878 | CATCCTTGTGAAAATGCCAT | 2 | 2 | 2 | NC | 41.96 | 71.11 | 6.97 | 16.53 | NA | NA | NA |
| 1658 | 2879 | CCATCCTTGTGAAAATGCCA | 2 | 2 | 2 | NC | 40.33 | 60.89 | 9.79 | 11.35 | NA | NA | NA |
| 1659 | 2880 | CCCATCCTTGTGAAAATGCC | 2 | 2 | 2 | NC | 39.42 | 66.58 | 4.92 | 12.41 | NA | NA | NA |
| 1660 | 2881 | ACCCATCCTTGTGAAAATGC | 2 | 1 | 2 | NC | 48.54 | 80.91 | 7.11 | 17.46 | NA | NA | NA |
| 1661 | 2882 | CACCCATCCTTGTGAAAATG | 2 | 2 | 2 | NC | 53.01 | 81.62 | 5.57 | 14.54 | NA | NA | NA |
| 1662 | 2883 | GCACCCATCCTTGTGAAAAT | 1 | 2 | 2 | NC | 63.00 | 50.52 | 17.43 | 4.00 | NA | NA | NA |
| 1663 | 2884 | AGCACCCATCCTTGTGAAAA | 2 | 2 | 2 | NC | 83.48 | 40.78 | 10.03 | 6.56 | NA | NA | NA |
| 1664 | 2885 | CAGCACCCATCCTTGTGAAA | 1 | 2 | 2 | NC | 67.26 | 46.89 | 7.73 | 5.09 | NA | NA | NA |
| 1665 | 2886 | GCAGCACCCATCCTTGTGAA | 1 | 2 | 1 | NC | 49.70 | 35.28 | 3.93 | 3.66 | NA | NA | NA |
| 1668 | 2891 | TGTCTGCAGCACCCATCCTT | 2 | 2 | 2 | NC | 49.54 | 16.39 | 3.49 | 2.77 | NA | NA | NA |
| 1669 | 2892 | TTGTCTGCAGCACCCATCCT | 2 | 2 | 2 | NC | 55.67 | 31.03 | 3.82 | 8.49 | NA | NA | NA |
| 1670 | 2893 | ATTGTCTGCAGCACCCATCC | 2 | 1 | 1 | NC | 45.50 | 26.60 | 2.04 | 4.51 | NA | NA | NA |
| 1671 | 2894 | TATTGTCTGCAGCACCCATC | 2 | 2 | 2 | NC | 48.24 | 22.99 | 5.75 | 5.61 | NA | NA | NA |
| 1672 | 2895 | ATATTGTCTGCAGCACCCAT | 2 | 2 | 2 | NC | 55.40 | 26.44 | 6.04 | 5.69 | NA | NA | NA |
| 1673 | 2896 | TATATTGTCTGCAGCACCCA | 2 | 3 | 2 | NC | 63.58 | 22.39 | 6.37 | 2.86 | NA | NA | NA |
| 1674 | 2897 | ATATATTGTCTGCAGCACCC | 2 | 2 | 2 | 2 | 46.55 | 29.58 | 8.36 | 2.45 | NA | NA | NA |
| 1675 | 2898 | TATATATTGTCTGCAGCACC | 2 | 3 | 2 | 2 | 56.94 | 32.12 | 3.10 | 4.06 | NA | NA | NA |
| 1713 | 2936 | TGTCAGTCAGTTCTTCCATA | 2 | 2 | NC | NC | 38.51 | 31.85 | 2.04 | 4.00 | NA | NA | NA |
| 1714 | 2937 | GTGTCAGTCAGTTCTTCCAT | 2 | 2 | NC | NC | 29.33 | 22.59 | 2.08 | 1.96 | NA | NA | NA |
| 1716 | 2939 | CTGTGTCAGTCAGTTCTTCC | 2 | 2 | NC | NC | 37.78 | 53.84 | 5.88 | 49.02 | NA | NA | NA |
| 1717 | 2940 | GCTGTGTCAGTCAGTTCTTC | 2 | 2 | NC | NC | 25.54 | 25.11 | 4.03 | 8.61 | NA | NA | NA |
| 1718 | 2941 | TGCTGTGTCAGTCAGTTCTT | 2 | 2 | NC | NC | 29.89 | 21.07 | 1.44 | 4.46 | NA | NA | NA |
| 1719 | 2942 | CTGCTGTGTCAGTCAGTTCT | 2 | 2 | NC | NC | 25.76 | 18.43 | 2.31 | 1.49 | 0.14 | 0.46 | ND |
| 1720 | 2943 | TCTGCTGTGTCAGTCAGTTC | 2 | 2 | NC | NC | 28.57 | 21.19 | 2.04 | 2.12 | NA | NA | NA |
| 1721 | 2944 | TTCTGCTGTGTCAGTCAGTT | 2 | 2 | NC | NC | 29.39 | 18.60 | 1.64 | 2.41 | 0.07 | 0.31 | 6.67 |
| 1722 | 2945 | TTTCTGCTGTGTCAGTCAGT | 2 | 2 | NC | NC | 39.28 | 22.93 | 5.12 | 4.54 | NA | NA | NA |
| 1724 | 2947 | TATTTCTGCTGTGTCAGTCA | 2 | 2 | NC | NC | 51.45 | 41.86 | 5.98 | 7.72 | NA | NA | NA |
| 1727 | 2950 | GATTATTTCTGCTGTGTCAG | 2 | 2 | NC | NC | 37.06 | 25.29 | 5.86 | 4.85 | NA | NA | NA |
| 1728 | 2951 | TGATTATTTCTGCTGTGTCA | 2 | 2 | NC | NC | 29.42 | 20.64 | 4.83 | 3.41 | NA | NA | NA |
| 1729 | 2952 | CTGATTATTTCTGCTGTGTC | 2 | 2 | NC | NC | 28.67 | 21.32 | 4.45 | 1.95 | NA | NA | NA |
| 1730 | 2953 | TCTGATTATTTCTGCTGTGT | 2 | 2 | NC | NC | 21.19 | 16.41 | 2.77 | 1.76 | 0.09 | 0.33 | ND |
| 1731 | 2954 | TTCTGATTATTTCTGCTGTG | 2 | 2 | NC | NC | 29.96 | 18.56 | 12.13 | 3.24 | 0.06 | 0.46 | 11.81 |
| 1740 | 2963 | ATGTTGCTTTTCTGATTATT | 2 | 2 | NC | NC | 57.50 | 67.22 | 8.03 | 30.02 | NA | NA | NA |
| 1741 | 2964 | GATGTTGCTTTTCTGATTAT | 2 | 2 | NC | NC | 60.65 | 42.71 | 7.69 | 8.70 | NA | NA | NA |
| 1745 | 2968 | CTGTGATGTTGCTTTTCTGA | 2 | 2 | NC | NC | 29.03 | 19.64 | 2.51 | 2.17 | NA | NA | NA |
| 1746 | 2969 | ACTGTGATGTTGCTTTTCTG | 2 | 2 | NC | NC | 71.34 | 49.89 | 9.61 | 3.05 | NA | NA | NA |
| 1747 | 2970 | GACTGTGATGTTGCTTTTCT | 2 | 2 | NC | NC | 41.02 | 35.87 | 5.17 | 9.28 | NA | NA | NA |
| 1751 | 2974 | CAAGGACTGTGATGTTGCTT | 2 | 2 | NC | NC | 30.19 | 24.05 | 1.81 | 2.64 | NA | NA | NA |
| 1752 | 2975 | CCAAGGACTGTGATGTTGCT | 2 | 2 | NC | NC | 26.91 | 22.69 | 1.86 | 3.46 | NA | NA | NA |
| 1753 | 2976 | ACCAAGGACTGTGATGTTGC | 2 | 2 | NC | NC | 31.72 | 26.81 | 5.62 | 8.26 | NA | NA | NA |
| 1754 | 2977 | AACCAAGGACTGTGATGTTG | 2 | 2 | NC | NC | 29.04 | 25.79 | 4.23 | 4.06 | NA | NA | NA |
| 1755 | 2978 | TAACCAAGGACTGTGATGTT | 2 | 2 | NC | NC | 54.12 | 26.12 | 5.33 | 4.43 | NA | NA | NA |
| 1799 | 3049 | ATACTCAAGTGTAGCATAGG | 3 | 3 | NC | NC | 61.97 | 29.64 | 9.76 | 5.83 | NA | NA | NA |
| 1800 | 3050 | AATACTCAAGTGTAGCATAG | 2 | 2 | NC | NC | 66.45 | 32.84 | 6.70 | 4.05 | NA | NA | NA |
| 1801 | 3051 | AAATACTCAAGTGTAGCATA | 2 | 2 | NC | NC | 83.11 | 40.50 | 10.34 | 9.22 | NA | NA | NA |
| 1859 | 3135 | ACCTGGTGTGAGTAATTTTT | 2 | 2 | NC | NC | 39.74 | 33.52 | 4.06 | 3.70 | NA | NA | NA |
| 1860 | 3146 | GGTAATTCCCCACCTGGTGT | 2 | 2 | NC | NC | 30.16 | 46.33 | 3.99 | 22.16 | NA | NA | NA |
| 1861 | 3147 | TGGTAATTCCCCACCTGGTG | 2 | 3 | NC | NC | 29.88 | 18.10 | 12.44 | 4.67 | 0.04 | 0.17 | ND |
| 1862 | 3154 | TCCCATGTGGTAATTCCCCA | 3 | 2 | 2 | NC | 38.85 | 33.98 | 4.14 | 3.58 | NA | NA | NA |
| 1863 | 3155 | ATCCCATGTGGTAATTCCCC | 2 | 2 | 2 | NC | 45.13 | 42.96 | 16.88 | 5.88 | NA | NA | NA |
| 1864 | 3156 | AATCCCATGTGGTAATTCCC | 2 | 3 | 2 | NC | 46.56 | 56.15 | 1.87 | 7.55 | NA | NA | NA |
| 1865 | 3157 | GAATCCCATGTGGTAATTCC | 2 | 2 | 2 | NC | 43.98 | 36.52 | 4.54 | 3.54 | NA | NA | NA |
| 1866 | 3158 | AGAATCCCATGTGGTAATTC | 2 | 2 | 1 | NC | 50.81 | 39.97 | 4.17 | 3.24 | NA | NA | NA |
| 1867 | 3159 | AAGAATCCCATGTGGTAATT | 2 | 2 | 1 | NC | 70.78 | 68.91 | 8.85 | 8.07 | NA | NA | NA |
| 1868 | 3160 | CAAGAATCCCATGTGGTAAT | 2 | 2 | 2 | NC | 57.30 | 34.39 | 6.47 | 1.13 | NA | NA | NA |
| 1869 | 3161 | CCAAGAATCCCATGTGGTAA | 1 | 1 | 2 | NC | 38.91 | 22.81 | 4.39 | 1.10 | NA | NA | NA |
| 1892 | 3186 | TCCAGTTTGCTTTCATCCTC | 2 | 2 | NC | NC | 76.01 | 88.11 | 9.13 | 11.04 | NA | NA | NA |
| 1893 | 3187 | ATCCAGTTTGCTTTCATCCT | 2 | 2 | NC | NC | 81.36 | 92.92 | 11.09 | 5.38 | NA | NA | NA |
| 1894 | 3188 | GATCCAGTTTGCTTTCATCC | 2 | 2 | NC | NC | 58.44 | 41.92 | 12.70 | 2.97 | NA | NA | NA |
| 1895 | 3189 | GGATCCAGTTTGCTTTCATC | 2 | 2 | NC | NC | 55.68 | 30.10 | 6.00 | 2.80 | NA | NA | NA |
| 1896 | 3190 | TGGATCCAGTTTGCTTTCAT | 2 | 2 | NC | NC | 53.87 | 33.06 | 4.88 | 7.44 | NA | NA | NA |
| 1903 | 3218 | CAAAATCAGGGACTTGTTCT | 2 | 2 | NC | NC | 62.87 | 90.64 | 5.52 | 61.69 | NA | NA | NA |
| 1904 | 3219 | ACAAAATCAGGGACTTGTTC | 2 | 2 | NC | NC | 54.02 | 54.01 | 5.45 | 0.88 | NA | NA | NA |
| 1905 | 3220 | GACAAAATCAGGGACTTGTT | 2 | 2 | NC | NC | 34.95 | 38.02 | 3.58 | 2.61 | NA | NA | NA |
| 1906 | 3221 | TGACAAAATCAGGGACTTGT | 2 | 2 | NC | NC | 50.22 | 36.75 | 10.72 | 4.79 | NA | NA | NA |
| 1907 | 3222 | GTGACAAAATCAGGGACTTG | 2 | 2 | NC | NC | 56.19 | 39.89 | 13.13 | 0.56 | NA | NA | NA |
| 1908 | 3223 | GGTGACAAAATCAGGGACTT | 2 | 2 | NC | NC | 45.29 | 29.23 | 3.97 | 0.69 | NA | NA | NA |
| 1925 | 3240 | GTTATTTGGTAAAGGAAGGT | 2 | 2 | NC | NC | 57.29 | 52.34 | 22.76 | 5.96 | NA | NA | NA |
| 1935 | 3250 | AATTCCTCTAGTTATTTGGT | 2 | 2 | NC | NC | 58.09 | 58.38 | 4.71 | 6.93 | NA | NA | NA |
| 1954 | 3269 | ATCCATAACTCCTTGCTGCA | 2 | 2 | NC | NC | 36.60 | 34.46 | 3.20 | 9.69 | NA | NA | NA |
| 1962 | 3277 | CACATTTAATCCATAACTCC | 2 | 2 | NC | NC | 73.57 | 99.41 | 2.49 | 5.56 | NA | NA | NA |
| 1963 | 3278 | CCACATTTAATCCATAACTC | 2 | 2 | NC | NC | 62.10 | 100.32 | 14.47 | 8.69 | NA | NA | NA |
| 1964 | 3279 | GCCACATTTAATCCATAACT | 2 | 2 | NC | NC | 27.86 | 49.22 | 4.72 | 6.22 | NA | NA | NA |
| 1965 | 3280 | AGCCACATTTAATCCATAAC | 2 | 2 | NC | NC | 30.97 | 48.86 | 3.37 | 0.84 | NA | NA | NA |
| 1966 | 3281 | TAGCCACATTTAATCCATAA | 2 | 2 | NC | NC | 25.37 | 38.04 | 5.36 | 8.00 | NA | NA | NA |
| 1967 | 3282 | TTAGCCACATTTAATCCATA | 2 | 2 | NC | NC | 61.79 | 60.00 | 4.25 | 7.29 | NA | NA | NA |
| 1969 | 3284 | GTTTAGCCACATTTAATCCA | 2 | 2 | NC | NC | 62.58 | 47.39 | 6.33 | 3.81 | NA | NA | NA |
| 1970 | 3285 | AGTTTAGCCACATTTAATCC | 2 | 2 | NC | NC | 81.56 | 74.86 | 4.07 | 1.02 | NA | NA | NA |
| 1971 | 3286 | TAGTTTAGCCACATTTAATC | 2 | 2 | NC | NC | 83.42 | 80.09 | 12.41 | 4.87 | NA | NA | NA |
| 2025 | 3352 | TATTAATCCTTCCAGCTCTT | 2 | 2 | NC | NC | 76.70 | 80.33 | 8.30 | 7.62 | NA | NA | NA |
| 2026 | 3353 | TTATTAATCCTTCCAGCTCT | 2 | 2 | NC | NC | 101.93 | 72.29 | 38.99 | 5.36 | NA | NA | NA |
| 2027 | 3354 | TTTATTAATCCTTCCAGCTC | 2 | 2 | NC | NC | 83.62 | 61.86 | 7.60 | 4.09 | NA | NA | NA |
| 2066 | 3400 | CATCGTCCATAACTTTGCAA | 3 | 2 | NC | NC | 33.22 | 23.89 | 3.20 | 2.08 | NA | NA | NA |
| 2067 | 3401 | GCATCGTCCATAACTTTGCA | 2 | 2 | NC | NC | 30.13 | 24.58 | 3.62 | 5.37 | NA | NA | NA |
| 2068 | 3402 | TGCATCGTCCATAACTTTGC | 2 | 2 | NC | NC | 26.51 | 15.88 | 3.42 | 2.55 | 0.12 | 0.47 | ND |
| 2069 | 3403 | ATGCATCGTCCATAACTTTG | 2 | 2 | NC | NC | 46.65 | 27.73 | 6.24 | 3.68 | NA | NA | NA |
| 2070 | 3404 | TATGCATCGTCCATAACTTT | 3 | 2 | NC | NC | 75.29 | 35.45 | 10.66 | 3.70 | NA | NA | NA |
| 2075 | 3428 | TCCACTTCTGCAGGTCTTGT | 2 | 2 | NC | NC | 35.98 | 21.28 | 6.82 | 4.55 | NA | NA | NA |
| 2076 | 3429 | GTCCACTTCTGCAGGTCTTG | 2 | 2 | NC | NC | 32.19 | 18.86 | 2.52 | 2.42 | NA | NA | NA |
| 2077 | 3430 | TGTCCACTTCTGCAGGTCTT | 2 | 2 | NC | NC | 35.15 | 34.84 | 6.67 | 4.98 | NA | NA | NA |
| 2078 | 3431 | CTGTCCACTTCTGCAGGTCT | 2 | 2 | NC | NC | 35.87 | 26.34 | 6.79 | 1.84 | NA | NA | NA |
| 2079 | 3432 | TCTGTCCACTTCTGCAGGTC | 2 | 2 | NC | NC | 37.04 | 24.80 | 3.68 | 1.87 | NA | NA | NA |
| 2108 | 3462 | GAAGTCTGTGTTTCTTCCAT | 2 | 2 | NC | NC | 31.09 | 25.62 | 7.10 | 3.54 | NA | NA | NA |
| 2138 | 3531 | TTGTACAGTTGGTATTTTTA | 2 | 2 | NC | NC | 48.13 | 36.80 | 8.86 | 7.67 | NA | NA | NA |
| 2143 | 3536 | TTATTTTGTACAGTTGGTAT | 2 | 2 | NC | NC | 48.18 | 50.26 | 14.21 | 3.39 | NA | NA | NA |
| 2144 | 3537 | GTTATTTTGTACAGTTGGTA | 3 | 2 | NC | NC | 38.42 | 24.67 | 3.62 | 2.01 | NA | NA | NA |
| 2145 | 3538 | AGTTATTTTGTACAGTTGGT | 3 | 2 | NC | NC | 38.93 | 29.43 | 4.93 | 3.92 | NA | NA | NA |
| 2146 | 3539 | GAGTTATTTTGTACAGTTGG | 2 | 2 | NC | NC | 47.46 | 32.24 | 10.39 | 4.53 | NA | NA | NA |
| 2147 | 3540 | AGAGTTATTTTGTACAGTTG | 2 | 2 | NC | NC | 61.10 | 41.21 | 5.97 | 8.65 | NA | NA | NA |
| 2156 | 3549 | TGTTACTGGAGAGTTATTTT | 2 | 2 | NC | NC | 68.06 | 56.63 | 14.65 | 8.01 | NA | NA | NA |
| 2157 | 3550 | CTGTTACTGGAGAGTTATTT | 2 | 2 | NC | NC | 45.90 | 48.42 | 13.51 | 12.26 | NA | NA | NA |
| 2158 | 3551 | GCTGTTACTGGAGAGTTATT | 2 | 2 | NC | NC | 38.58 | 24.20 | 8.97 | 3.62 | NA | NA | NA |
| 2159 | 3552 | GGCTGTTACTGGAGAGTTAT | 2 | 2 | NC | NC | 30.97 | 22.33 | 4.43 | 4.80 | NA | NA | NA |
| 2160 | 3553 | AGGCTGTTACTGGAGAGTTA | 2 | 2 | NC | NC | 28.83 | 22.37 | 10.30 | 4.03 | NA | NA | NA |
| 2193 | 3594 | TACCATGGTCATAATTTTAT | 2 | 2 | NC | NC | 38.71 | 19.75 | 5.86 | 2.34 | NA | NA | NA |
| 2194 | 3595 | ATACCATGGTCATAATTTTA | 2 | 2 | NC | NC | 40.08 | 30.60 | 4.87 | 3.21 | NA | NA | NA |
| 2299 | 3756 | TTATATTCTGCCACTTAAGG | 2 | 2 | NC | NC | 62.64 | 32.32 | 8.92 | 2.78 | NA | NA | NA |
| 2300 | 3757 | ATTATATTCTGCCACTTAAG | 2 | 2 | NC | NC | 76.61 | 37.79 | 7.95 | 13.87 | NA | NA | NA |
| 2302 | 3759 | GAATTATATTCTGCCACTTA | 2 | 2 | NC | NC | 76.68 | 65.77 | 15.50 | 3.10 | NA | NA | NA |
| 2312 | 3769 | AAAAGCTTGGGAATTATATT | 2 | 2 | NC | NC | 100.82 | 44.55 | 22.85 | 3.63 | NA | NA | NA |
| 2313 | 3770 | CAAAAGCTTGGGAATTATAT | 2 | 2 | NC | NC | 81.54 | 37.94 | 15.16 | 0.76 | NA | NA | NA |
| 2385 | 3904 | GTTCTTGGTGGATAAACTGG | 2 | 2 | NC | NC | 37.40 | 25.72 | 10.73 | 2.86 | NA | NA | NA |
| 2388 | 3907 | TATGTTCTTGGTGGATAAAC | 2 | 2 | NC | NC | 50.84 | 35.79 | 9.14 | 2.56 | NA | NA | NA |
| 2390 | 3909 | CTTATGTTCTTGGTGGATAA | 2 | 2 | NC | NC | 35.97 | 27.90 | 5.01 | 1.29 | NA | NA | NA |
| 2391 | 3910 | TCTTATGTTCTTGGTGGATA | 2 | 2 | NC | NC | 36.07 | 32.37 | 9.77 | 2.38 | NA | NA | NA |
| 2392 | 3911 | TTCTTATGTTCTTGGTGGAT | 2 | 2 | NC | NC | 34.28 | 32.94 | 5.66 | 0.84 | NA | NA | NA |
| 2393 | 3912 | ATTCTTATGTTCTTGGTGGA | 2 | 2 | NC | NC | 49.37 | 44.48 | 2.24 | 1.61 | NA | NA | NA |
| 2394 | 3913 | AATTCTTATGTTCTTGGTGG | 2 | 2 | NC | NC | 36.70 | 33.41 | 3.18 | 2.71 | NA | NA | NA |
| 2395 | 3914 | AAATTCTTATGTTCTTGGTG | 2 | 2 | NC | NC | 31.32 | 34.05 | 2.76 | 6.78 | NA | NA | NA |
| 2416 | 4077 | AGTAGAGATGTACTTTATAT | 2 | 2 | NC | NC | 48.81 | 43.76 | 7.27 | 5.62 | NA | NA | NA |
| 2417 | 4078 | TAGTAGAGATGTACTTTATA | 2 | 2 | NC | NC | 51.73 | 45.33 | 6.97 | 14.13 | NA | NA | NA |
| 2418 | 4079 | TTAGTAGAGATGTACTTTAT | 2 | 2 | NC | NC | 44.05 | 32.62 | 5.14 | 4.84 | NA | NA | NA |
| 2460 | 4284 | GCTTGATAATTCTATTTCTT | 2 | 2 | NC | NC | 28.78 | 27.45 | 3.64 | 4.24 | NA | NA | NA |
| 2462 | 4286 | AAGCTTGATAATTCTATTTC | 2 | 2 | NC | NC | 71.05 | 33.54 | 8.25 | 2.08 | NA | NA | NA |
| 2463 | 4297 | CTAGTTTTTAAAAGCTTGAT | 2 | 2 | NC | NC | 64.80 | 32.74 | 13.18 | 2.68 | NA | NA | NA |

### Example 3. In Vitro Screen for Reduced Expansion

[0336] Expansion of DNA triplet repeats can be replicated in vitro using patient-derived cells lines and DNA-damaging agents. Human fibroblasts from Huntington's (GM04281, GM04687 and GM04212) or Friedreich's Ataxia patients (GM03816 and GM02153) or Myotonic Dystrophy) (GM04602, GM03987 and GM03989) are purchased from Coriell Cell Repositories and are maintained in medium following the manufacturer's instructions (Kovtum et al., 2007 Nature, 447(7143): 447-452; Li et al., 2016 Biopreservation and Biobanking 14(4):324-29; Zhang et al., 2013 Mol Ther 22(2): 312-320). To induce CAG-repeat expansion in vitro, fibroblast cells are treated with oxidizing agents such as hydrogen peroxide (H₂O₂), potassium chromate (K₂CrC₄) or potassium bromate (KBrO₃) for up to 2 hrs (Kovtum et al., ibid). Cells are washed, and medium replace to allow cells to recover for 3 days. The treatment is repeated up to twice more before cells are harvested and DNA isolated. CAG repeat length is determined using methods described below.

[0337] Expansion of DNA triplet repeats can be replicated in vitro using patient-derived cell lines. Induced pluripotent stem cells (iPSC) derived from Human fibroblasts from Huntington's Patients (CS09iHD-109n1) are purchased from Cedars-Sinai RMI Induced Pluripotent Stem Cell Core and are maintained following the manufacturer's recommendations (https://www.cedars-sinai.org/content/dam/cedars-sinai/research/documents/biomanufacturing/recommended-guidelines-for-handling-ipscsv1.pdf). The CAG repeat from an iPSC line with 109 CAGs shows an increase in CAG repeat size over time, with an average expansion of 4 CAG repeats over 70 days in dividing iPS cells (Goold et al., 2019 Human Molecular Genetics February 15; 28(4): 650-661).

[0338] CS09iHD-109n1 iPSC are treated with either LNP-formulated siRNA or ASO for continuous knockdown of target mRNA and CAG repeat expansion is determined by DNA fragment analysis described below. SiRNAs or ASOs are added to cells in varying concentrations every 3 to 15 days and knockdown of mRNA is determined by RT-qPCR using standard molecular biology techniques. DNA and mRNA are isolated from cells according to standard techniques at t=0.14 days, 28 days, 42 days, 56 days and 80 days. Lines represent linear regression best fits. The differences in expansion between treatment and control are compared according to a linear repeated-measures model, and at each time point according to Tukey's post-hoc tests.

### Example 4

[0339] Genomic DNA Extraction and Quantitation of CAG Repeat Length by Small Pool-PCR (sp-PCR) Analyses

[0340] Genomic DNA is purified using standard Proteinase K digestions and extracted using DNAzol (Invitrogen) following the manufacturer's instructions. CAG repeat length is determined by small pool-PCR analyses as previously described (Mario Gomes-Pereira and Darren Monckton, 2017, Front Cell Neuro 11:153). In brief, DNA is digested with HindIII, diluted to a final concentration between 1-6 μg/μl and approximately 10 pg was used in subsequent PCR reactions. Primer flaking Exon 1 of the human HTT are used to amplify the CAG alleles and the PCR product is resolved by electrophoresis. Subsequently, Southern blot hybridization is performed, and the CAG alleles are observed by autoradiography OR visualized with ethidium bromide staining. CAG length can be measured directly by sequencing on a MiSeQ or appropriate machine. The change in CAG repeat number in various treatment groups in comparison with controls is calculated using simple descriptive statistics (e.g. mean±standard deviation).

[0341] Genomic DNA Extraction and Quantitation of CAG Repeat Length by DNA Fragment Analyses

[0342] Genomic DNA is purified using DNAeasy Blood and Tissue Kit (Qiagen) following the manufacturer's instructions. DNA is quantified by Qubit dsDNA assay (ThemoScientific) and CAG repeat length is determined by fragment analysis by Laragen (Culver City, Calif.).

### Example 5. Mouse Studies

[0343] Natural History Studies in HD Mouse Models:

[0344] The HD mouse R6/2 line is transgenic for the 5′ end of the human HD gene (HTT) carrying approximately 120 CAG repeat expansions. HTT is ubiquitously expressed. Transgenic mice exhibit a progressive neurological phenotype that mimics many of the pathological features of HD, including choreiform-like movements, involuntary stereotypic movements, tremor, and epileptic seizures, as well as nonmovement disorder components, including unusual vocalization. They urinate frequently and exhibit loss of body weight and muscle bulk through the course of the disease. Neurologically these mice develop Neuronal Intranuclear Inclusions (NII) which contain both the huntingtin and ubiquitin proteins. Previously unknown, these NII have subsequently been identified in HD patients. The age of onset for development of HD symptoms in R6/2 mice has been reported to occur between 9 and 11 weeks (Mangiarini et al., 1996 Cell 87: 493-506).

[0345] Somatic expansions were reported in R6/2 mice striatum, cortex and liver. Somatic instability increased with higher constitutive length (Larson et al, Neurobiology of Disease 76 (2015) 98-111). A natural history study in R6/2 mice with 120 CAG repeats was performed. Their genotype and length of CAG expansion was determined. R6/2 mice at 4, 8, 12 and 16 weeks of age (4 male and 4 female mice per age group) were sacrificed. Striatum, cerebellum, cortex, liver, kidney, heart, spleen, lung, duodenum, colon, quadricep, CSF and plasma were collected and snap frozen in liquid nitrogen. Genomic DNA was extracted, the length of CAG repeats measured, and the instability index was calculated from striatum, cerebellum, cortex, liver and kidney according to Lee et al. BMC Systems Biology 2010, 4:29). At 12 and 16 weeks of age, the striatum showed a significant increase of somatic expansion as measured by the instability index (****p<0.0001, One-way ANOVA) (FIG. 1). No changes in somatic expansion were observed across all ages in the R6/2 mouse cerebellum (FIG. 2)

[0346] Mouse models recapitulating many of the features of trinucleotide repeat expansion diseases including, HD, FA and DM1, are readily available from commercial venders and academic institutions (Polyglutamine Disorders, Advances in Experimental Medicine and Biology, Vol 1049, 2018: Editors Clevio Nobrega and Lois Pereira de Almeida, Springer). All mouse experiments are conducted in accordance with local IACUC guidelines. Three examples of different diseased mouse models and how they could be used to investigate the usefulness of pharmacological intervention against MSH3 for somatic expansion are included below.

[0347] In Huntington's research, several transgenic and knock-in mouse models were generated to investigate the underlying pathological mechanisms involved in the disease. For example, the R6/2 transgenic mouse contains a transgene of ˜1.9 kb of human HTT containing 144 copies of the CAG repeat (Mangiarini et al., 1996 Cell 87: 493-506) while the HdhQ111 model was generated by replacing the mouse HTT exon 1 with a human exon1 containing 111 copies of the CAG repeat (Wheeler et al., 2000 Hum Mol Genet 9:503-513). Both the R6/2 and HdhQ111 models replicate many of the features of human HD including motor and behavioral dysfunctions, neuronal loss, as well as the expansion of CAG repeats in the striatum (Pouladi et al., 2013, Nature Reviews Neuroscience 14: 708-721; Mangiarini et al., 1997 Nature Genet 15: 197-200; Wheeler et al., Hum Mol Genet 8: 115-122).

[0348] R6/2 mice are genotyped using DNA derived from tail snips at weaning and the CAG repeat size is determined. Mice are randomized into groups (n=12/group) at weaning at 4 wks old and dosed with monthly (week 4 and 8) ICV injection of either PBS (control) or up to a 500 μg dose of oligos targeting MSH3. A series of oligos targeting different regions of MSH3 can be tested to identify the most efficacious oligo sequence in vivo. At 12 weeks of age, mice are euthanized, and tissues extracted for analyses. The list of tissues includes, but not restricted to, striatum, cortex, cerebellum, and liver. Genomic DNA is extracted and the length of CAG repeats measured as described below. CSF and plasma are collected for biomarker analysis. Additional pertinent mouse models of HD can be considered.

[0349] In Friedreich Ataxia, the YG8 FRDA transgenic mouse model is commonly used to understand the pathology (Al-Mandawi et al., 2006 Genomics 88(5)580-590; Bourn et al., 2012 PLOS One 7(10); e47085). This model was generated through the insertion of a human YAC transgenic containing in the background of a null FRDA mouse. The YG8 model demonstrates somatic expansion of the GAA triplet repeat expansion in neuronal tissues with only mild motor defects. YG8 FRDA mice are genotyped using DNA derived from tail snips at weaning and the CAG repeat size is determined using methods. To determine if MSH3 plays a role in somatic expansion of the disease allele, hemizygous YG8 FRDA animals are administered ICV with oligos targeting knockdown of MSH3 identified above.

[0350] Approximately 2 months later, animals are euthanized and tissues collected for molecular analyses. Suitable tissues are heart, quadriceps, dorsal root ganglia (DRG's), cerebellum, kidney, and liver. Genomic DNA is extracted, and the length of CAG repeats measured as described above in Example 4.

[0351] In Myotonic Dystrophy, the DM300-328 transgenic mouse model is suitable for investigating the pathology behind DM1. This mouse model has a large human genomic sequence (˜45 kb) containing over 300 CTG repeats and displays both the somatic expansion and degenerative muscle changes observed in human DM1 (Seznec et al., 2000; Tome et al., 2009 PLOS Genetics 5(5): e1000482; Pandey et al., 2015 J Pharmacol Exp Ther 355:329-340). DM300-328 mice are genotyped using DNA derived from tail snips at weaning and the CAG repeat size is determined. To determine if MSH3 plays a role in somatic expansion of the disease allele in myotonic dystrophy, DM300-328 transgenic animals are administered ASOs targeting knockdown of MSH3 by either subcutaneous injections (sc), intraperitoneal (ip) or intravenous tail injections (iv). Mice are administered ASOs up to 2×/week for maximum 8 weeks of treatment. Animals are euthanized at multiple time points and tissues collected for molecular analyses. Suitable tissues are quadriceps, heart, diaphragm, cortex, cerebellum, sperm, kidney, and liver. Genomic DNA is extracted and the length of CAG repeats measured and compared with parallel controls.

[0352] The HdhQ111 mouse model for Huntington Disease is a heterozygous knock-in line, in which the majority of exon 1 and part of intron 1 on one allele of the huntingtin gene (i.e., HTT or Huntington Disease gene) are replaced with human DNA containing ˜111 CAG repeats. In this example, ASOs to knock down MSH3 activity or levels is administered. After a treatment period, brain tissue from treated or untreated mice is isolated (e.g., striatum tissue) and analyzed using qRT-PCR as previously described to determine RNA levels of MSH3. Huntingtin gene repeat analysis is performed using mouse tissues (e.g., striatum tissue) after a treatment period using a human-specific PCR assay that amplifies the HTT CAG repeat from the knock-in allele but does not amplify the mouse sequence (i.e., the wild type allele). In this protocol, the forward primer is fluorescently labeled (e.g., with 6-FAM as described previously, for example Pinto R M, Dragileva E, Kirby A, et al. Mismatch repair genes MLH1 and MSH3 modify CAG instability in Huntington's disease mice: genome-wide and candidate approaches. PLoS Genet. 2013; 9(10):e1003930.), and products can be resolved using an analyzer with comparison against an internal size standard to generate CAG repeat size distribution traces. Repeat size is determined from the peak with the greatest intensity from a control tissue (e.g., tail tissue in a mouse) and from an affected tissue (e.g., brain striatum tissue or brain cortex tissue). Immunohistochemistry is carried out with polyclonal anti-huntingtin antibody (e.g., EM48) on paraffin-embedded or otherwise prepared sections of brain tissue and can be quantified using a standardized staining index to capture both nuclear staining intensity and number of stained nuclei. A decrease in repeat size in affected tissue indicates that the agent that reduces the level and/or activity of MSH3 is capable of decreasing the repeat which are responsible for the toxic and/or defective gene products in Huntington's disease.

### Other Aspects

[0353] All publications, patents, and patent applications mentioned in this specification are incorporated herein by reference in their entirety to the same extent as if each individual publication, patent, or patent application was specifically and individually indicated to be incorporated by reference in its entirety. Where a term in the present application is found to be defined differently in a document incorporated herein by reference, the definition provided herein is to serve as the definition for the term.

[0354] While the invention has been described in connection with specific aspects thereof, it will be understood that invention is capable of further modifications and this application is intended to cover any variations, uses, or adaptations of the invention following, in general, the principles of the invention and including such departures from the present disclosure that come within known or customary practice within the art to which the invention pertains and can be applied to the essential features hereinbefore set forth, and follows in the scope of the claimed.

[0355] In addition to the various aspects described herein, the present disclosure includes the following aspects numbered E1 through E90. This list of aspects is presented as an exemplary list and the application is not limited to these particular.

[0356] E1. A single-stranded oligonucleotide of 10-30 linked nucleosides in length, wherein the oligonucleotide comprises a region of at least 10 contiguous nucleobases having at least 80% complementarity to an MSH3 gene.

[0357] E2. The oligonucleotide of E1, wherein the oligonucleotide comprises: (a) a DNA core sequence comprising linked deoxyribonucleosides; (b) a 5′ flanking sequence comprising linked nucleosides; and (c) a 3′ flanking sequence comprising linked nucleosides; wherein the DNA core comprises a region of at least 10 contiguous nucleobases having at least 80% complementarity to an MSH3 gene and is positioned between the 5′ flanking sequence and the 3′ flanking sequence; wherein the 5′ flanking sequence and the 3′ flanking sequence each comprises at least two linked nucleosides; and wherein at least one nucleoside of each flanking sequence comprises an alternative nucleoside.

[0358] E3. A single-stranded oligonucleotide of 10-30 linked nucleosides in length for inhibiting expression of a human MSH3 gene in a cell, wherein the oligonucleotide comprises a region of at least 10 contiguous nucleobases having at least 80% complementarity to an MSH3 gene.

[0359] E4. The oligonucleotide of E3, wherein the oligonucleotide comprises: (a) a DNA core comprising linked deoxyribonucleosides; (b) a 5′ flanking sequence comprising linked nucleosides; and (c) a 3′ flanking sequence comprising linked nucleosides; wherein the DNA core comprises a region of at least 10 contiguous nucleobases having at least 80% complementarity to an MSH3 gene and is positioned between the 5′ flanking sequence and the 3′ flanking sequence; wherein the 5′ flanking sequence and the 3′ flanking sequence each comprises at least two linked nucleosides; and wherein at least one nucleoside of each flanking sequence comprises an alternative nucleoside.

[0360] E5. The oligonucleotide of any one of E1-E4, wherein the region of at least 10 nucleobases has at least 90% complementary to an MSH3 gene.

[0361] E6. The oligonucleotide of any one of E1-E5, wherein the region of at least 10 nucleobases has at least 95% complementary to an MSH3 gene.

[0362] E7. The oligonucleotide of any one of E1-E6, wherein the region of at least 10 nucleobases is complementary to an MSH3 gene corresponding to a sequence of reference mRNA NM_002439.4 at one or more of positions 155-199, 355-385, 398-496, 559-589, 676-724, 762-810, 876-903, 912-974, 984-1047, 1054-1098, 1114-1179, 1200-1227, 1294-1337, 1392-1417, 1467-1493, 1517-1630, 1665-1747, 1768-1866, 2029-2063, 2087-2199, 2262-2293, 2304-2330, 2371-2410, 2432-2458, 2494-2521, 2539-2647, 2679-2713, 2727-2753, 2767-2920, 2933-3000, 3046-3073, 31323245, 3266-3306, 3397-3484, 3528-3575, 3591-3617, 3753-3792, 3901-3936, 4074-4101, or 4281-4319 of the MSH3 gene.

[0363] E8. The oligonucleotide of any one of E1-E7, wherein the region of at least 10 nucleobases is complementary to an MSH3 gene corresponding to a sequence of reference mRNA NM_002439.4 at one or more of positions 155-199, 359-385, 398-496, 559-589, 676-724, 762-810, 876-974, 984-1098, 1114-1179, 1200-1227, 1294-1337, 1392-1417, 1467-1493, 1517-1630, 1665-1747, 1834-1866, 2029-2056, 2093-2199, 2262-2293, 2304-2329, 2371-2410, 2433-2458, 2494-2521, 2539-2647, 2679-2713, 2727-2753, 2767-2920, 2933-3000, 3046-3072, 3132-3245, 3266-3303, 3397-3484, 3528-3575, 3591-3617, 3753-3792, 3901-3936, 4076-4101, or 4281-43190f the MSH3 gene.

[0364] E9. The oligonucleotide of any one of E1-E6, wherein the region of at least 10 nucleobases is complementary to an MSH3 gene corresponding to a sequence of reference mRNA NM_002439.4 at one or more of positions 155-196, 359-385, 413-462, 559-589, 676-724, 762-810, 876-974, 984-1096, 1114-1179, 1200-1227, 1294-1337, 1467-1493, 1517-1630, 1665-1747, 1834-1866, 2029-2056, 2093-2199, 2265-2293, 2378-2410, 2433-2458, 2494-2521, 2539-2647, 2679-2712, 2727-2753, 2767-2919, 2934-3000, 3046-3071, 3144-3183, 3220-3245, 3397-3484, 3534-3575, 3591-3616, 3901-3931, or 4281-4306 of the MSH3 gene.

[0365] E10. The oligonucleotide of any one of E1-E6, wherein the region of at least 10 nucleobases is complementary to an MSH3 gene corresponding to a sequence of reference mRNA NM_002439.4 at one or more of positions 435-462, 559-584, 763-808, 876-902, 931-958, 1001-1083, 1114-1179, 1294-1337, 1544-1578, 1835-1863, 2031-2056, 2144-2169, 2543-2577, 2590-2615, 2621-2647, 2685-2711, 2769-2795, or 2816-2868 of the MSH3 gene.

[0366] E11. The oligonucleotide of any one of E1-E6, wherein the region of at least 10 nucleobases is complementary to an MSH3 gene corresponding to a sequence of reference mRNA NM_002439.4 at one or more of positions 876-902, 930-958, 1056-1081, 1114-1139, 1154-1179, 1310-1337, 1546-1571, 1836-1862, 2141-2199, 2267-2292, 2540-2580, 2620-2647, 2686-2711, 2769-2868, 2939-2976, 3144-3169, or 3399-3424 of the MSH3 gene.

[0367] E12. The oligonucleotide of any one of E1-E6, wherein the region of at least 10 nucleobases is complementary to an MSH3 gene corresponding to a sequence of reference mRNA NM_002439.4 at one or more of positions 984-1021, 1467-1493, 1722-1747, 1767-1802, 1833-1861, 2385-2410, 2554-2581, 2816-2845, 2861-2920, or 3151-3183 of the MSH3 gene.

[0368] E13. The oligonucleotide of any one of E1-E6, wherein the oligonucleotide comprises the nucleobase sequence of any one of SEQ ID NOs: 6-2545.

[0369] E14. The oligonucleotide of any one of E1-E6, wherein the oligonucleotide comprises the nucleobase sequence of any one of SEQ ID NOs: 20, 22-29, 31-32, 77-78, 81-82, 115, 117, 130, 132-134, 144-145, 147, 167-168, 210, 212-215, 290-293, 295-296, 299-305, 309, 351-359, 361-362, 365-366, 368, 407-409, 432, 437-442, 444, 459-460, 479, 482-493, 497-498, 500-501, 503-512, 543-550, 552-560, 562, 582-585, 588-591, 603-604, 611, 613-616, 659, 661, 699-700, 702, 705-707, 724-725, 770-771, 812-816, 838-842, 845-852, 856, 883-885, 889, 893-897, 936, 940-941, 945, 948, 950, 955, 959-961, 965-968, 972-973, 999, 1007, 1016-1017, 1019, 1021-1022, 1036, 1040-1045, 1047, 1170, 1172-1173, 1211, 1216, 1222, 1235, 1240-1242, 1244-1249, 1251-1252, 1254-1259, 1268, 1316, 1318-1322, 1328-1329, 1373-1375, 1379-1383, 1386-1387, 1407-1408, 1433-1435, 1450-1451, 1454-1461, 1476-1477, 1496-1499, 1532, 1538-1541, 1565-1566, 1579, 1581-1589, 1591, 1600-1607, 1610, 1625, 1627-1629, 1631-1639, 1643, 1650-1660, 1663-1665, 1668-1675, 1713-1714, 1716-1722, 1724, 1727-1731, 1741, 1745-1747, 1751-1755, 1799-1801, 1859-1866, 1868-1869, 1894-1896, 1905-1908, 1954, 1964-1966, 1969, 2066-2070, 2075-2079, 2108, 2138, 2143-2147, 2157-2160, 2193-2194, 2299-2300, 2312-2313, 2385, 2388, 2390-2395, 2416-2418, 2460, 2462, or 2463.

[0370] E15. The oligonucleotide of any one of E1-E6, wherein the oligonucleotide comprises the nucleobase sequence of any one of SEQ ID NOs: 20, 22, 25-29, 31-32, 81-82, 115, 130, 132-134, 144, 145, 147, 168, 210, 212-215, 290-293, 295-296, 299-305, 309, 351-359, 361-362, 365-366, 368, 407-409, 432, 437-442, 444, 459-460, 479, 482-493, 497-498, 500-501, 503-506, 508-512, 543-550, 552-560, 562, 582-585, 589-591, 603-604, 611, 613-616, 659, 661, 699-700, 702, 705-707, 724, 770-771, 812-816, 838-842, 845-852, 856, 883-885, 889, 893-897, 936, 940-941, 945, 948, 950, 955, 959-961, 965-968, 972-973, 1041-1045, 1047, 1170, 1172, 1216, 1222, 1235, 1241-1242, 1244-1249, 1251-1252, 1254-1259, 1268, 1316, 1318-1319, 1321-1322, 1328, 1373, 1379-1383, 1386-1387, 1408, 1433-1435, 1450-1451, 1454-1461, 1476-1477, 1496-1499, 1532, 1538-1541, 1565-1566, 1579, 1581-1582, 1584-1589, 1591, 1601-1607, 1610, 1625, 1627-1629, 1631-1638, 1650-1655, 1659, 1665, 1668-1675, 1713-1714, 1716-1722, 1727-1731, 1745, 1747, 1751-1755, 1799-1800, 1859, 1861-1862, 1865-1866, 1868-1869, 1895-1896, 1905-1908, 1954, 1694-1966, 2066-2070, 2075-2079, 2108, 2138, 2144-2146, 2158-2160, 2193-2194, 2299, 2300, 2313, 2385, 2388, 2390-2392, 2394-2395, 2418, 2460, or 2462-2463.

[0371] E16. The oligonucleotide of any one of E1-E6, wherein the oligonucleotide comprises the nucleobase sequence of any one of SEQ ID NOs: 20, 25-29, 32, 81-82, 130, 133-134, 144-145, 147, 210, 212-213, 215, 290-293, 295-296, 299-304, 309, 351, 352-359, 361-362, 365-366, 368, 407-409, 432, 437-442, 444, 460, 479, 482-486, 488-492, 497-498, 500-501, 503-506, 508-512, 544-550, 553-558, 560, 582-585, 589, 603-604, 611, 613-616, 659, 661, 699-700, 702, 705-707, 770-771, 812-816, 838-842, 845-851, 856, 883, 885, 889, 893, 895-897, 936, 940, 945, 961. 965-968, 972-973, 1041-1045, 1047, 1170, 1172, 1216, 1222, 1235, 1244, 1246-1249, 1251-1252, 1254-1255, 1257-1259, 1268, 1319, 1321-1322, 1380-1381, 1386-1387, 1408, 1433-1435, 1450-1451, 1454-1461, 1476-1477, 1496-1499, 1532, 1538-1540, 1565-1566, 1579, 1581-1582, 1584-1589, 1591, 1601-1604, 1606-1607, 1610, 1625, 1627-1629, 1631-1638, 1651-1654, 1668, 1670-1674, 1714, 1717-1722, 1727-1731, 1745, 1751-1755, 1799, 1861, 1869, 1908, 1964, 1966, 2066-2069, 2075-2076, 2078-2079, 2108, 2144-2145, 2158-2160, 2193, 2385, 2390, or 2460.

[0372] E17. The oligonucleotide of E1-E6, wherein the oligonucleotide comprises the nucleobase sequence of any one of SEQ ID NOs: 145, 147, 210, 352, 365, 366, 407, 408, 439-442, 444, 492, 500, 504, 511, 512, 544-547, 582, 604, 616, 699, 700, 702, 705-707, 839-842, 848, 1042-1045, 1172, 1255, 1454-1457, 1477-1499, 1538, 1539, 1581, 1582, 1606, 1607, 1610, or 1631-1633.

[0373] E18. The oligonucleotide of any one of E1-E6, wherein the oligonucleotide comprises the nucleobase sequence of any one of SEQ ID NOs: 407, 408, 441, 442, 444, 545, 582, 616, 705-707, 841, 1043, 1044, 1252, 1255, 1268, 1321, 1451, 1454-1460, 1497-1499, 1538, 1539, 1581, 1582, 1587, 1601, 1602, 1606, 1607, 1610, 1631-1633, 1719, 1721, 1730, 1731, 1861, or 2068.

[0374] E19. The oligonucleotide of any one of E1-E6, wherein the oligonucleotide comprises the nucleobase sequence of any one of SEQ ID NOs: 479, 482-491, 770, 771, 973, 998-1000, 1007, 1008, 1040-1043, 1387, 1454, 1456, 1459-1461, 1538, 1539, 1606, 1607, 1610, 1643-1665, 1668-1675, or 1862-1869.

[0375] E20. The oligonucleotide of any one of E1-E6, wherein the nucleobase sequence of the oligonucleotide consists of any one of SEQ ID NOs: 6-2545.

[0376] E21. The oligonucleotide of any one of E1-E6, wherein the oligonucleotide consists of the nucleobase sequence of any one of SEQ ID NOs: 20, 22-29, 31-32, 77-78, 81-82, 115, 117, 130, 132-134, 144-145, 147, 167-168, 210, 212-215, 290-293, 295-296, 299-305, 309, 351-359, 361-362, 365-366, 368, 407-409, 432, 437-442, 444, 459-460, 479, 482-493, 497-498, 500-501, 503-512, 543-550, 552-560, 562, 582-585, 588-591, 603-604, 611, 613-616, 659, 661, 699-700, 702, 705-707, 724-725, 770-771, 812-816, 838-842, 845-852, 856, 883-885, 889, 893-897, 936, 940-941, 945, 948, 950, 955, 959-961, 965-968, 972-973, 999, 1007, 1016-1017, 1019, 1021-1022, 1036, 1040-1045, 1047, 1170, 1172-1173, 1211, 1216, 1222, 1235, 1240-1242, 1244-1249, 1251-1252, 1254-1259, 1268, 1316, 1318-1322, 1328-1329, 1373-1375, 1379-1383, 1386-1387, 1407-1408, 1433-1435, 1450-1451, 1454-1461, 1476-1477, 1496-1499, 1532, 1538-1541, 1565-1566, 1579, 1581-1589, 1591, 1600-1607, 1610, 1625, 1627-1629, 1631-1639, 1643, 1650-1660, 1663-1665, 1668-1675, 1713-1714, 1716-1722, 1724, 1727-1731, 1741, 1745-1747, 1751-1755, 1799-1801, 1859-1866, 1868-1869, 1894-1896, 1905-1908, 1954, 1964-1966, 1969, 2066-2070, 2075-2079, 2108, 2138, 2143-2147, 2157-2160, 2193-2194, 2299-2300, 2312-2313, 2385, 2388, 2390-2395, 2416-2418, 2460, 2462, or 2463.

[0377] E22. The oligonucleotide of any one of E1-E6, wherein the oligonucleotide consists of the nucleobase sequence of any one of SEQ ID NOs: 20, 22, 25-29, 31-32, 81-82, 115, 130, 132-134, 144, 145, 147, 168, 210, 212-215, 290-293, 295-296, 299-305, 309, 351-359, 361-362, 365-366, 368, 407-409, 432, 437-442, 444, 459-460, 479, 482-493, 497-498, 500-501, 503-506, 508-512, 543-550, 552-560, 562, 582-585, 589-591, 603-604, 611, 613-616, 659, 661, 699-700, 702, 705-707, 724, 770-771, 812-816, 838-842, 845-852, 856, 883-885, 889, 893-897, 936, 940-941, 945, 948, 950, 955, 959-961, 965-968, 972-973, 1041-1045, 1047, 1170, 1172, 1216, 1222, 1235, 1241-1242, 1244-1249, 1251-1252, 1254-1259, 1268, 1316, 1318-1319, 1321-1322, 1328, 1373, 1379-1383, 1386-1387, 1408, 1433-1435, 1450-1451, 1454-1461, 1476-1477, 1496-1499, 1532, 1538-1541, 1565-1566, 1579, 1581-1582, 1584-1589, 1591, 1601-1607, 1610, 1625, 1627-1629, 1631-1638, 1650-1655, 1659, 1665, 1668-1675, 1713-1714, 1716-1722, 1727-1731, 1745, 1747, 1751-1755, 1799-1800, 1859, 1861-1862, 1865-1866, 1868-1869, 1895-1896, 1905-1908, 1954, 1694-1966, 2066-2070, 2075-2079, 2108, 2138, 2144-2146, 2158-2160, 2193-2194, 2299, 2300, 2313, 2385, 2388, 2390-2392, 2394-2395, 2418, 2460, or 2462-2463.

[0378] E23. The oligonucleotide of any one of E1-E6, wherein the oligonucleotide consists of the nucleobase sequence of any one of SEQ ID NOs: 20, 25-29, 32, 81-82, 130, 133-134, 144-145, 147, 210, 212-213, 215, 290-293, 295-296, 299-304, 309, 351, 352-359, 361-362, 365-366, 368, 407-409, 432, 437-442, 444, 460, 479, 482-486, 488-492, 497-498, 500-501, 503-506, 508-512, 544-550, 553-558, 560, 582-585, 589, 603-604, 611, 613-616, 659, 661, 699-700, 702, 705-707, 770-771, 812-816, 838-842, 845-851, 856, 883, 885, 889, 893, 895-897, 936, 940, 945, 961. 965-968, 972-973, 1041-1045, 1047, 1170, 1172, 1216, 1222, 1235, 1244, 1246-1249, 1251-1252, 1254-1255, 1257-1259, 1268, 1319, 1321-1322, 1380-1381, 1386-1387, 1408, 1433-1435, 1450-1451, 1454-1461, 1476-1477, 1496-1499, 1532, 1538-1540, 1565-1566, 1579, 1581-1582, 1584-1589, 1591, 1601-1604, 1606-1607, 1610, 1625, 1627-1629, 1631-1638, 1651-1654, 1668, 1670-1674, 1714, 1717-1722, 1727-1731, 1745, 1751-1755, 1799, 1861, 1869, 1908, 1964, 1966, 2066-2069, 2075-2076, 2078-2079, 2108, 2144-2145, 2158-2160, 2193, 2385, 2390, or 2460.

[0379] E24. The oligonucleotide of any one of E1-E6, wherein the oligonucleotide consists of the nucleobase sequence of any one of SEQ ID NOs: 145, 147, 210, 352, 365, 366, 407, 408, 439-442, 444, 492, 500, 504, 511, 512, 544-547, 582, 604, 616, 699, 700, 702, 705-707, 839-842, 848, 1042-1045, 1172, 1255, 1454-1457, 1477-1499, 1538, 1539, 1581, 1582, 1606, 1607, 1610, or 1631-1633.

[0380] E25. The oligonucleotide of any one of E1-E6, wherein the oligonucleotide consists of the nucleobase sequence of any one of SEQ ID NOs: 407, 408, 441, 442, 444, 545, 582, 616, 705-707, 841, 1043, 1044, 1252, 1255, 1268, 1321, 1451, 1454-1460, 1497-1499, 1538, 1539, 1581, 1582, 1587, 1601, 1602, 1606, 1607, 1610, 1631-1633, 1719, 1721, 1730, 1731, 1861, or 2068.

[0381] E26. The oligonucleotide of any one of E1-E6, wherein the oligonucleotide consists of the nucleobase sequence of any one of SEQ ID NOs: 479, 482-491, 770, 771, 973, 998-1000, 1007, 1008, 1040-1043, 1387, 1454, 1456, 1459-1461, 1538, 1539, 1606, 1607, 1610, 1643-1665, 1668-1675, or 1862-1869.

[0382] E27. The oligonucleotide of any one of E1-E26, wherein the oligonucleotide exhibits at least 50% mRNA inhibition at a 20 nM oligonucleotide concentration when determined using a cell assay when compared with a control cell.

[0383] E28. The oligonucleotide of any one of E1-E26, wherein the oligonucleotide exhibits at least 60% mRNA inhibition at a 20 nM oligonucleotide concentration when determined using a cell assay when compared with a control cell.

[0384] E29. The oligonucleotide of any one of E1-E26, wherein the oligonucleotide exhibits at least 70% mRNA inhibition at a 20 nM oligonucleotide concentration when determined using a cell assay when compared with a control cell.

[0385] E30. The oligonucleotide of any one of E1-E26, wherein the oligonucleotide exhibits at least 85% mRNA inhibition at a 20 nM oligonucleotide concentration when determined using a cell assay when compared with a control cell.

[0386] E31. The oligonucleotide of any one of E1-E26, wherein the oligonucleotide exhibits at least 50% mRNA inhibition at a 2 nM when determined using a cell assay when compared with a control cell.

[0387] E32. The oligonucleotide of any one of E1-E26, wherein the oligonucleotide exhibits at least 60% mRNA inhibition at a 2 nM oligonucleotide concentration when determined using a cell assay when compared with a control cell.

[0388] E33. The oligonucleotide of any one of E1-E26, wherein the oligonucleotide exhibits at least 70% mRNA inhibition at a 2 nM oligonucleotide concentration when determined using a cell assay when compared with a control cell.

[0389] E34. The oligonucleotide of any one of E1-E26, wherein the oligonucleotide exhibits at least 85% mRNA inhibition at a 2 nM oligonucleotide concentration when determined using a cell assay when compared with a control cell.

[0390] E35. The oligonucleotide of any one of E1-E34, wherein the oligonucleotide comprises at least one alternative internucleoside linkage.

[0391] E36. The oligonucleotide of E35, wherein the at least one alternative internucleoside linkage is a phosphorothioate internucleoside linkage.

[0392] E37. The oligonucleotide of E35, wherein the at least one alternative internucleoside linkage is a 2′-alkoxy internucleoside linkage.

[0393] E38. The oligonucleotide of E35, wherein the at least one alternative internucleoside linkage is an alkyl phosphate internucleoside linkage.

[0394] E39. The oligonucleotide of any one of E1-E38, wherein the oligonucleotide comprises at least one alternative nucleobase.

[0395] E40. The oligonucleotide of E39, wherein the alternative nucleobase is 5′-methylcytosine, pseudouridine, or 5-methoxyuridine.

[0396] E41. The modified oligonucleotide of any one of E1-E40, wherein the oligonucleotide comprises at least one alternative sugar moiety.

[0397] E42. The modified oligonucleotide of E41, wherein the alternative sugar moiety is 2′-OMe or a bicyclic nucleic acid.

[0398] E43. The oligonucleotide of any one of E1-E42, wherein the oligonucleotide further comprises a ligand conjugated to the 5′ end or the 3′ end of the oligonucleotide through a monovalent or branched bivalent or trivalent linker.

[0399] E44. The oligonucleotide of any one of E1-E43, wherein oligonucleotide comprises a region complementary to at least 17 contiguous nucleotides of a MSH3 gene.

[0400] E45. The oligonucleotide of any one of E1-E43, wherein oligonucleotide comprises a region complementary to at least 19 contiguous nucleotides of a MSH3 gene.

[0401] E46. The oligonucleotide of any one of E1-E43, wherein the oligonucleotide comprises a region complementary to 19 to 23 contiguous nucleotides of a MSH3 gene.

[0402] E47. The oligonucleotide of any one of E1-E43, wherein the oligonucleotide comprises a region complementary to 19 contiguous nucleotides of a MSH3 gene.

[0403] E48. The oligonucleotide of any one of E1-E43, wherein the oligonucleotide comprises a region complementary to 20 contiguous nucleotides of a MSH3 gene.

[0404] E49. The oligonucleotide of any one of E1-E43, wherein the oligonucleotide is from about 15 to 25 nucleosides in length.

[0405] E50. The oligonucleotide of any one of E1-E43, wherein the oligonucleotide is 20 nucleosides in length.

[0406] E51. A pharmaceutical composition comprising one or more of the oligonucleotides of any one of E1-E50 and a pharmaceutically acceptable carrier or excipient.

[0407] E52. A composition comprising one or more of the oligonucleotides of any one of E1-E50 and a lipid nanoparticle, a polyplex nanoparticle, a lipoplex nanoparticle, or a liposome.

[0408] E53. A method of inhibiting transcription of MSH3 in a cell, the method comprising contacting the cell with one or more of the oligonucleotides of any one of E1-E50, the pharmaceutical composition of E51, or the composition of E52 for a time sufficient to obtain degradation of an mRNA transcript of a MSH3 gene, inhibits expression of the MSH3 gene in the cell.

[0409] E54. A method of treating, preventing, or delaying the progression a trinucleotide repeat expansion disorder in a subject in need thereof, the method comprising administering to the subject one or more of the oligonucleotides of any one of E1-E50, the pharmaceutical composition of E51, or the composition of E52.

[0410] E55. A method of reducing the level and/or activity of MSH3 in a cell of a subject identified as having a trinucleotide repeat expansion disorder, the method comprising contacting the cell with one or more of the oligonucleotides of any one of E1-E50, the pharmaceutical composition of E51, or the composition of E52.

[0411] E56. A method for inhibiting expression of an MSH3 gene in a cell comprising contacting the cell with one or more of the oligonucleotides of any one of E1-E50, the pharmaceutical composition of E51, or the composition of E52 and maintaining the cell for a time sufficient to obtain degradation of a mRNA transcript of an MSH3 gene, thereby inhibiting expression of the MSH3 gene in the cell.

[0412] E57. A method of decreasing trinucleotide repeat expansion in a cell, the method comprising contacting the cell with one or more of the oligonucleotides of any one of E1-E50, the pharmaceutical composition of E51, or the composition of E52.

[0413] E58. The method of E56 or E57, wherein the cell is in a subject.

[0414] E59. The method of any one of E54, E55, and E58, wherein the subject is a human.

[0415] E60. The method of any one of E54-E58, wherein the cell is a cell of the central nervous system or a muscle cell.

[0416] E61. The method of any one of E54, E55, and E58-60, wherein the subject is identified as having a trinucleotide repeat expansion disorder.

[0417] E62. The method of any one of E54, E55, and E57-61, wherein the trinucleotide repeat expansion disorder is a polyglutamine disease.

[0418] E63. The method of E62, wherein the polyglutamine disease is selected from the group consisting of dentatorubropallidoluysian atrophy, Huntington's disease, spinal and bulbar muscular atrophy, spinocerebellar ataxia type 1, spinocerebellar ataxia type 2, spinocerebellar ataxia type 3, spinocerebellar ataxia type 6, spinocerebellar ataxia type 7, spinocerebellar ataxia type 17, and Huntington's disease-like 2.

[0419] E64. The method of any one of E54-E61, wherein the trinucleotide repeat expansion disorder is a non-polyglutamine disease.

[0420] E65. The method of E64, wherein the non-polyglutamine disease is selected from the group consisting of fragile X syndrome, fragile X-associated tremor/ataxia syndrome, fragile XE mental retardation, Friedreich's ataxia, myotonic dystrophy type 1, spinocerebellar ataxia type 8, spinocerebellar ataxia type 12, oculopharyngeal muscular dystrophy, Fragile X-associated premature ovarian failure, FRA2A syndrome, FRA7A syndrome, and early infantile epileptic encephalopathy.

[0421] E66. One or more oligonucleotides of any one of E1-E50, the pharmaceutical composition of E51, or the composition of E52, for use in the prevention or treatment of a trinucleotide repeat expansion disorder.

[0422] E67. The oligonucleotide, pharmaceutical composition, or composition of E65, wherein the trinucleotide repeat expansion disorder is selected from the group consisting of dentatorubropallidoluysian atrophy, Huntington's disease, spinal and bulbar muscular atrophy, spinocerebellar ataxia type 1, spinocerebellar ataxia type 2, spinocerebellar ataxia type 3, spinocerebellar ataxia type 6, spinocerebellar ataxia type 7, spinocerebellar ataxia type 17, Huntington's disease-like 2, fragile X syndrome, fragile X-associated tremor/ataxia syndrome, fragile XE mental retardation, Friedreich's ataxia, myotonic dystrophy type 1, spinocerebellar ataxia type 8, spinocerebellar ataxia type 12, oculopharyngeal muscular dystrophy, Fragile X-associated premature ovarian failure, FRA2A syndrome, FRA7A syndrome, and early infantile epileptic encephalopathy.

[0423] E68. The oligonucleotide, pharmaceutical composition, or composition of E66 or E67, wherein the trinucleotide repeat expansion disorder is Huntington's disease.

[0424] E69. The oligonucleotide, pharmaceutical composition, or composition for the use of E66 or E67, wherein the trinucleotide repeat expansion disorder is Friedreich's ataxia.

[0425] E70. The oligonucleotide, pharmaceutical composition, or composition for the use of E66 or E67, wherein the trinucleotide repeat expansion disorder is myotonic dystrophy type 1.

[0426] E71. The oligonucleotide, pharmaceutical composition, or composition for the use of any of E66-E70, wherein the modified oligonucleotide, pharmaceutical composition, or composition is administered intrathecally.

[0427] E72. The oligonucleotide, pharmaceutical composition, or composition of any of E66-E70, wherein the modified oligonucleotide, pharmaceutical composition, or composition is administered intraventricularly.

[0428] E73. The oligonucleotide, pharmaceutical composition, or composition of any of E66-E70, wherein the oligonucleotide, pharmaceutical composition, or composition is administered intramuscularly.

[0429] E74. A method of treating, preventing, or delaying progression a disorder in a subject in need thereof wherein the subject is suffering from trinucleotide repeat expansion disorder, comprising administering to said subject one or more of the oligonucleotides of any one of E1-E50, the pharmaceutical composition of E51, or the composition of E52.

[0430] E75. The method of E74, further comprising administering an additional therapeutic agent.

[0431] E76. The method of E75, wherein the additional therapeutic agent is another oligonucleotide that hybridizes to an mRNA encoding the Huntingtin gene.

[0432] E77. A method of preventing or delaying the progression of a trinucleotide repeat expansion disorder in a subject, the method comprising administering to the subject one or more of the oligonucleotides of any one of E1-E50, the pharmaceutical composition of E51, or the composition of E52 in an amount effective to delay progression of a trinucleotide repeat expansion disorder of the subject.

[0433] E78. The method of E77, wherein the trinucleotide repeat expansion disorder is selected from the group consisting of dentatorubropallidoluysian atrophy, Huntington's disease, spinal and bulbar muscular atrophy, spinocerebellar ataxia type 1, spinocerebellar ataxia type 2, spinocerebellar ataxia type 3, spinocerebellar ataxia type 6, spinocerebellar ataxia type 7, spinocerebellar ataxia type 17, Huntington's disease-like 2, fragile X syndrome, fragile X-associated tremor/ataxia syndrome, fragile XE mental retardation, Friedreich's ataxia, myotonic dystrophy type 1, spinocerebellar ataxia type 8, spinocerebellar ataxia type 12, oculopharyngeal muscular dystrophy, Fragile X-associated premature ovarian failure, FRA2A syndrome, FRA7A syndrome, and early infantile epileptic encephalopathy.

[0434] E79. The method of E77 or E78, wherein the trinucleotide repeat expansion disorder is Huntington's disease.

[0435] E80. The method of E77 or E78, wherein the trinucleotide repeat expansion disorder is Friedrich's ataxia.

[0436] E81. The method of E77 or E78, wherein the trinucleotide repeat expansion disorder is myotonic Dystrophy type 1.

[0437] E82. The method of E77 or E78, further comprising administering an additional therapeutic agent.

[0438] E83. The method of E82, wherein the additional therapeutic agent is an oligonucleotide that hybridizes to an mRNA encoding the Huntingtin gene.

[0439] E84. The method of any of E77-E83, wherein progression of the trinucleotide repeat expansion disorder is delayed by at least 120 days, for example, at least 6 months, at least 12 months, at least 2 years, at least 3 years, at least 4 years, at least 5 years, at least 10 years or more, when compared with a predicted progression.

[0440] E85. One or more oligonucleotides of any one of E1-E50, the pharmaceutical composition of E51, or the composition of E52, for use in preventing or delaying progression of a trinucleotide repeat expansion disorder in a subject.

[0441] E86. The oligonucleotide, pharmaceutical composition, or composition of E85, wherein the trinucleotide repeat expansion disorder is selected from the group consisting of dentatorubropallidoluysian atrophy, Huntington's disease, spinal and bulbar muscular atrophy, spinocerebellar ataxia type 1, spinocerebellar ataxia type 2, spinocerebellar ataxia type 3, spinocerebellar ataxia type 6, spinocerebellar ataxia type 7, spinocerebellar ataxia type 17, Huntington's disease-like 2, fragile X syndrome, fragile X-associated tremor/ataxia syndrome, fragile XE mental retardation, Friedreich's ataxia, myotonic dystrophy type 1, spinocerebellar ataxia type 8, spinocerebellar ataxia type 12, oculopharyngeal muscular dystrophy, Fragile X-associated premature ovarian failure, FRA2A syndrome, FRA7A syndrome, and early infantile epileptic encephalopathy.

[0442] E87. The oligonucleotide, pharmaceutical composition, or composition of E85 or E86, wherein the trinucleotide repeat expansion disorder is Huntington's disease.

[0443] E88. The oligonucleotide, pharmaceutical composition, or composition of E85 or E86, wherein the trinucleotide repeat expansion disorder is Friedrich's ataxia.

[0444] E89. The oligonucleotide, pharmaceutical composition, or composition of E85 or E86, wherein the trinucleotide repeat expansion disorder is myotonic Dystrophy type 1.

[0445] E90. The oligonucleotide, pharmaceutical composition, or composition of any one of E85-E89, wherein progression of the trinucleotide repeat expansion disorder is delayed by at least 120 days, for example, at least 6 months, at least 12 months, at least 2 years, at least 3 years, at least 4 years, at least 5 years, at least 10 years or more, when compared with a predicted progression.

1. A single-stranded oligonucleotide of 10-30 linked nucleosides in length, wherein the oligonucleotide comprises a region of at least 10 contiguous nucleobases having at least 80% complementarity to an MSH3 gene.

2. The oligonucleotide of claim 1, wherein the oligonucleotide comprises:
(a) a DNA core sequence comprising linked deoxyribonucleosides;
(b) a 5′ flanking sequence comprising linked nucleosides; and
(c) a 3′ flanking sequence comprising linked nucleosides;
wherein the DNA core comprises a region of at least 10 contiguous nucleobases having at least 80% complementarity to an MSH3 gene and is positioned between the 5′ flanking sequence and the 3′ flanking sequence; wherein the 5′ flanking sequence and the 3′ flanking sequence each comprises at least two linked nucleosides; and wherein at least one nucleoside of each flanking sequence comprises an alternative nucleoside.

3. A single-stranded oligonucleotide of 10-30 linked nucleosides in length for inhibiting expression of a human MSH3 gene in a cell, wherein the oligonucleotide comprises a region of at least 10 contiguous nucleobases having at least 80% complementarity to an MSH3 gene.

4. The oligonucleotide of claim 3, wherein the oligonucleotide comprises:
(a) a DNA core comprising linked deoxyribonucleosides;
(b) a 5′ flanking sequence comprising linked nucleosides; and
(c) a 3′ flanking sequence comprising linked nucleosides;
wherein the DNA core comprises a region of at least 10 contiguous nucleobases having at least 80% complementarity to an MSH3 gene and is positioned between the 5′ flanking sequence and the 3′ flanking sequence; wherein the 5′ flanking sequence and the 3′ flanking sequence each comprises at least two linked nucleosides; and wherein at least one nucleoside of each flanking sequence comprises an alternative nucleoside.

5. The oligonucleotide of any one of claims 1-4, wherein the region of at least 10 nucleobases has at least 90% complementary to an MSH3 gene

6. The oligonucleotide of any one of claims 1-5, wherein the region of at least 10 nucleobases has at least 95% complementary to an MSH3 gene.

7. The oligonucleotide of any one of claims 1-6, wherein the region of at least 10 nucleobases is complementary to an MSH3 gene corresponding to a sequence of reference mRNA NM_002439.4 at one or more of positions 155-199, 355-385, 398-496, 559-589, 676-724, 762-810, 876-903, 912-974, 984-1047, 1054-1098, 1114-1179, 1200-1227, 1294-1337, 1392-1417, 1467-1493, 1517-1630, 1665-1747, 1768-1866, 2029-2063, 2087-2199, 2262-2293, 2304-2330, 2371-2410, 2432-2458, 2494-2521, 2539-2647, 2679-2713, 2727-2753, 2767-2920, 2933-3000, 3046-3073, 31323245, 3266-3306, 3397-3484, 3528-3575, 3591-3617, 3753-3792, 3901-3936, 4074-4101, or 4281-4319 of the MSH3 gene.

8. The oligonucleotide of any one of claims 1-6, wherein the region of at least 10 nucleobases is complementary to an MSH3 gene corresponding to a sequence of reference mRNA NM_002439.4 at one or more of positions 155-199, 359-385, 398-496, 559-589, 676-724, 762-810, 876-974, 984-1098, 1114-1179, 1200-1227, 1294-1337, 1392-1417, 1467-1493, 1517-1630, 1665-1747, 1834-1866, 2029-2056, 2093-2199, 2262-2293, 2304-2329, 2371-2410, 2433-2458, 2494-2521, 2539-2647, 2679-2713, 2727-2753, 2767-2920, 2933-3000, 3046-3072, 3132-3245, 3266-3303, 3397-3484, 3528-3575, 3591-3617, 3753-3792, 3901-3936, 4076-4101, or 4281-4319 of the MSH3 gene.

9. The oligonucleotide of any one of claims 1-6, wherein the region of at least 10 nucleobases is complementary to an MSH3 gene corresponding to a sequence of reference mRNA NM_002439.4 at one or more of positions 155-196, 359-385, 413-462, 559-589, 676-724, 762-810, 876-974, 984-1096, 1114-1179, 1200-1227, 1294-1337, 1467-1493, 1517-1630, 1665-1747, 1834-1866, 2029-2056, 2093-2199, 2265-2293, 2378-2410, 2433-2458, 2494-2521, 2539-2647, 2679-2712, 2727-2753, 2767-2919, 2934-3000, 3046-3071, 3144-3183, 3220-3245, 3397-3484, 3534-3575, 3591-3616, 3901-3931, or 4281-4306 of the MSH3 gene.

10. The oligonucleotide of any one of claims 1-6, wherein the region of at least 10 nucleobases is complementary to an MSH3 gene corresponding to a sequence of reference mRNA NM_002439.4 at one or more of positions 435-462, 559-584, 763-808, 876-902, 931-958, 1001-1083, 1114-1179, 1294-1337, 1544-1578, 1835-1863, 2031-2056, 2144-2169, 2543-2577, 2590-2615, 2621-2647, 2685-2711, 2769-2795, or 2816-2868 of the MSH3 gene.

11. The oligonucleotide of any one of claims 1-6, wherein the region of at least 10 nucleobases is complementary to an MSH3 gene corresponding to a sequence of reference mRNA NM_002439.4 at one or more of positions 876-902, 930-958, 1056-1081, 1114-1139, 1154-1179, 1310-1337, 1546-1571, 1836-1862, 2141-2199, 2267-2292, 2540-2580, 2620-2647, 2686-2711, 2769-2868, 2939-2976, 3144-3169, or 3399-3424 of the MSH3 gene

12. The oligonucleotide of any one of claims 1-6, wherein the region of at least 10 nucleobases is complementary to an MSH3 gene corresponding to a sequence of reference mRNA NM_002439.4 at one or more of positions 984-1021, 1467-1493, 1722-1747, 1767-1802, 1833-1861, 2385-2410, 2554-2581, 2816-2845, 2861-2920, or 3151-3183 of the MSH3 gene.

13. The oligonucleotide of any one of claims 1-6, wherein the oligonucleotide comprises the nucleobase sequence of any one of SEQ ID NOs: 6-2545.

14. The oligonucleotide of any one of claims 1-6, wherein the oligonucleotide comprises the nucleobase sequence of any one of SEQ ID NOs: 20, 22-29, 31-32, 77-78, 81-82, 115, 117, 130, 132-134, 144-145, 147, 167-168, 210, 212-215, 290-293, 295-296, 299-305, 309, 351-359, 361-362, 365-366, 368, 407-409, 432, 437-442, 444, 459-460, 479, 482-493, 497-498, 500-501, 503-512, 543-550, 552-560, 562, 582-585, 588-591, 603-604, 611, 613-616, 659, 661, 699-700, 702, 705-707, 724-725, 770-771, 812-816, 838-842, 845-852, 856, 883-885, 889, 893-897, 936, 940-941, 945, 948, 950, 955, 959-961, 965-968, 972-973, 999, 1007, 1016-1017, 1019, 1021-1022, 1036, 1040-1045, 1047, 1170, 1172-1173, 1211, 1216, 1222, 1235, 1240-1242, 1244-1249, 1251-1252, 1254-1259, 1268, 1316, 1318-1322, 1328-1329, 1373-1375, 1379-1383, 1386-1387, 1407-1408, 1433-1435, 1450-1451, 1454-1461, 1476-1477, 1496-1499, 1532, 1538-1541, 1565-1566, 1579, 1581-1589, 1591, 1600-1607, 1610, 1625, 1627-1629, 1631-1639, 1643, 1650-1660, 1663-1665, 1668-1675, 1713-1714, 1716-1722, 1724, 1727-1731, 1741, 1745-1747, 1751-1755, 1799-1801, 1859-1866, 1868-1869, 1894-1896, 1905-1908, 1954, 1964-1966, 1969, 2066-2070, 2075-2079, 2108, 2138, 2143-2147, 2157-2160, 2193-2194, 2299-2300, 2312-2313, 2385, 2388, 2390-2395, 2416-2418, 2460, 2462, or 2463.

15. The oligonucleotide of any one of claims 1-6, wherein the oligonucleotide comprises the nucleobase sequence of any one of SEQ ID NOs: 20, 22, 25-29, 31-32, 81-82, 115, 130, 132-134, 144, 145, 147, 168, 210, 212-215, 290-293, 295-296, 299-305, 309, 351-359, 361-362, 365-366, 368, 407-409, 432, 437-442, 444, 459-460, 479, 482-493, 497-498, 500-501, 503-506, 508-512, 543-550, 552-560, 562, 582-585, 589-591, 603-604, 611, 613-616, 659, 661, 699-700, 702, 705-707, 724, 770-771, 812-816, 838-842, 845-852, 856, 883-885, 889, 893-897, 936, 940-941, 945, 948, 950, 955, 959-961, 965-968, 972-973, 1041-1045, 1047, 1170, 1172, 1216, 1222, 1235, 1241-1242, 1244-1249, 1251-1252, 1254-1259, 1268, 1316, 1318-1319, 1321-1322, 1328, 1373, 1379-1383, 1386-1387, 1408, 1433-1435, 1450-1451, 1454-1461, 1476-1477, 1496-1499, 1532, 1538-1541, 1565-1566, 1579, 1581-1582, 1584-1589, 1591, 1601-1607, 1610, 1625, 1627-1629, 1631-1638, 1650-1655, 1659, 1665, 1668-1675, 1713-1714, 1716-1722, 1727-1731, 1745, 1747, 1751-1755, 1799-1800, 1859, 1861-1862, 1865-1866, 1868-1869, 1895-1896, 1905-1908, 1954, 1694-1966, 2066-2070, 2075-2079, 2108, 2138, 2144-2146, 2158-2160, 2193-2194, 2299, 2300, 2313, 2385, 2388, 2390-2392, 2394-2395, 2418, 2460, or 2462-2463.

16. The oligonucleotide of any one of claims 1-6, wherein the oligonucleotide comprises the nucleobase sequence of any one of SEQ ID NOs: 20, 25-29, 32, 81-82, 130, 133-134, 144-145, 147, 210, 212-213, 215, 290-293, 295-296, 299-304, 309, 351, 352-359, 361-362, 365-366, 368, 407-409, 432, 437-442, 444, 460, 479, 482-486, 488-492, 497-498, 500-501, 503-506, 508-512, 544-550, 553-558, 560, 582-585, 589, 603-604, 611, 613-616, 659, 661, 699-700, 702, 705-707, 770-771, 812-816, 838-842, 845-851, 856, 883, 885, 889, 893, 895-897, 936, 940, 945, 961, 965-968, 972-973, 1041-1045, 1047, 1170, 1172, 1216, 1222, 1235, 1244, 1246-1249, 1251-1252, 1254-1255, 1257-1259, 1268, 1319, 1321-1322, 1380-1381, 1386-1387, 1408, 1433-1435, 1450-1451, 1454-1461, 1476-1477, 1496-1499, 1532, 1538-1540, 1565-1566, 1579, 1581-1582, 1584-1589, 1591, 1601-1604, 1606-1607, 1610, 1625, 1627-1629, 1631-1638, 1651-1654, 1668, 1670-1674, 1714, 1717-1722, 1727-1731, 1745, 1751-1755, 1799, 1861, 1869, 1908, 1964, 1966, 2066-2069, 2075-2076, 2078-2079, 2108, 2144-2145, 2158-2160, 2193, 2385, 2390, or 2460.

17. The oligonucleotide of any one of claims 1-6, wherein the oligonucleotide comprises the nucleobase sequence of any one of SEQ ID NOs: 145, 147, 210, 352, 365, 366, 407, 408, 439-442, 444, 492, 500, 504, 511, 512, 544-547, 582, 604, 616, 699, 700, 702, 705-707, 839-842, 848, 1042-1045, 1172, 1255, 1454-1457, 1477-1499, 1538, 1539, 1581, 1582, 1606, 1607, 1610, or 1631-1633.

18. The oligonucleotide of any one of claims 1-6, wherein the oligonucleotide comprises the nucleobase sequence of any one of SEQ ID NOs: 407, 408, 441, 442, 444, 545, 582, 616, 705-707, 841, 1043, 1044, 1252, 1255, 1268, 1321, 1451, 1454-1460, 1497-1499, 1538, 1539, 1581, 1582, 1587, 1601, 1602, 1606, 1607, 1610, 1631-1633, 1719, 1721, 1730, 1731, 1861, or 2068.

19. The oligonucleotide of any one of claims 1-6, wherein the oligonucleotide comprises the nucleobase sequence of any one of SEQ ID NOs: 479, 482-491, 770, 771, 973, 998-1000, 1007, 1008, 1040-1043, 1387, 1454, 1456, 1459-1461, 1538, 1539, 1606, 1607, 1610, 1643-1665, 1668-1675, or 1862-1869.

20. The oligonucleotide of any one of claims 1-6, wherein the nucleobase sequence of the oligonucleotide consists of any one of SEQ ID NOs: 6-2545.

21. The oligonucleotide of any one of claims 1-6, wherein the oligonucleotide consists of the nucleobase sequence of any one of SEQ ID NOs: 20, 22-29, 31-32, 77-78, 81-82, 115, 117, 130, 132-134, 144-145, 147, 167-168, 210, 212-215, 290-293, 295-296, 299-305, 309, 351-359, 361-362, 365-366, 368, 407-409, 432, 437-442, 444, 459-460, 479, 482-493, 497-498, 500-501, 503-512, 543-550, 552-560, 562, 582-585, 588-591, 603-604, 611, 613-616, 659, 661, 699-700, 702, 705-707, 724-725, 770-771, 812-816, 838-842, 845-852, 856, 883-885, 889, 893-897, 936, 940-941, 945, 948, 950, 955, 959-961, 965-968, 972-973, 999, 1007, 1016-1017, 1019, 1021-1022, 1036, 1040-1045, 1047, 1170, 1172-1173, 1211, 1216, 1222, 1235, 1240-1242, 1244-1249, 1251-1252, 1254-1259, 1268, 1316, 1318-1322, 1328-1329, 1373-1375, 1379-1383, 1386-1387, 1407-1408, 1433-1435, 1450-1451, 1454-1461, 1476-1477, 1496-1499, 1532, 1538-1541, 1565-1566, 1579, 1581-1589, 1591, 1600-1607, 1610, 1625, 1627-1629, 1631-1639, 1643, 1650-1660, 1663-1665, 1668-1675, 1713-1714, 1716-1722, 1724, 1727-1731, 1741, 1745-1747, 1751-1755, 1799-1801, 1859-1866, 1868-1869, 1894-1896, 1905-1908, 1954, 1964-1966, 1969, 2066-2070, 2075-2079, 2108, 2138, 2143-2147, 2157-2160, 2193-2194, 2299-2300, 2312-2313, 2385, 2388, 2390-2395, 2416-2418, 2460, 2462, or 2463.

22. The oligonucleotide of any one of claims 1-6, wherein the oligonucleotide consists of the nucleobase sequence of any one of SEQ ID NOs: 20, 22, 25-29, 31-32, 81-82, 115, 130, 132-134, 144, 145, 147, 168, 210, 212-215, 290-293, 295-296, 299-305, 309, 351-359, 361-362, 365-366, 368, 407-409, 432, 437-442, 444, 459-460, 479, 482-493, 497-498, 500-501, 503-506, 508-512, 543-550, 552-560, 562, 582-585, 589-591, 603-604, 611, 613-616, 659, 661, 699-700, 702, 705-707, 724, 770-771, 812-816, 838-842, 845-852, 856, 883-885, 889, 893-897, 936, 940-941, 945, 948, 950, 955, 959-961, 965-968, 972-973, 1041-1045, 1047, 1170, 1172, 1216, 1222, 1235, 1241-1242, 1244-1249, 1251-1252, 1254-1259, 1268, 1316, 1318-1319, 1321-1322, 1328, 1373, 1379-1383, 1386-1387, 1408, 1433-1435, 1450-1451, 1454-1461, 1476-1477, 1496-1499, 1532, 1538-1541, 1565-1566, 1579, 1581-1582, 1584-1589, 1591, 1601-1607, 1610, 1625, 1627-1629, 1631-1638, 1650-1655, 1659, 1665, 1668-1675, 1713-1714, 1716-1722, 1727-1731, 1745, 1747, 1751-1755, 1799-1800, 1859, 1861-1862, 1865-1866, 1868-1869, 1895-1896, 1905-1908, 1954, 1694-1966, 2066-2070, 2075-2079, 2108, 2138, 2144-2146, 2158-2160, 2193-2194, 2299, 2300, 2313, 2385, 2388, 2390-2392, 2394-2395, 2418, 2460, or 2462-2463.

23. The oligonucleotide of any one of claims 1-6, wherein the oligonucleotide consists of the nucleobase sequence of any one of SEQ ID NOs: 20, 25-29, 32, 81-82, 130, 133-134, 144-145, 147, 210, 212-213, 215, 290-293, 295-296, 299-304, 309, 351, 352-359, 361-362, 365-366, 368, 407-409, 432, 437-442, 444, 460, 479, 482-486, 488-492, 497-498, 500-501, 503-506, 508-512, 544-550, 553-558, 560, 582-585, 589, 603-604, 611, 613-616, 659, 661, 699-700, 702, 705-707, 770-771, 812-816, 838-842, 845-851, 856, 883, 885, 889, 893, 895-897, 936, 940, 945, 961, 965-968, 972-973, 1041-1045, 1047, 1170, 1172, 1216, 1222, 1235, 1244, 1246-1249, 1251-1252, 1254-1255, 1257-1259, 1268, 1319, 1321-1322, 1380-1381, 1386-1387, 1408, 1433-1435, 1450-1451, 1454-1461, 1476-1477, 1496-1499, 1532, 1538-1540, 1565-1566, 1579, 1581-1582, 1584-1589, 1591, 1601-1604, 1606-1607, 1610, 1625, 1627-1629, 1631-1638, 1651-1654, 1668, 1670-1674, 1714, 1717-1722, 1727-1731, 1745, 1751-1755, 1799, 1861, 1869, 1908, 1964, 1966, 2066-2069, 2075-2076, 2078-2079, 2108, 2144-2145, 2158-2160, 2193, 2385, 2390, or 2460.

24. The oligonucleotide of any one of claims 1-6, wherein the oligonucleotide consists of the nucleobase sequence of any one of SEQ ID NOs: 145, 147, 210, 352, 365, 366, 407, 408, 439-442, 444, 492, 500, 504, 511, 512, 544-547, 582, 604, 616, 699, 700, 702, 705-707, 839-842, 848, 1042-1045, 1172, 1255, 1454-1457, 1477-1499, 1538, 1539, 1581, 1582, 1606, 1607, 1610, or 1631-1633.

25. The oligonucleotide of any one of claims 1-6, wherein the oligonucleotide consists of the nucleobase sequence of any one of SEQ ID NOs: 407, 408, 441, 442, 444, 545, 582, 616, 705-707, 841, 1043, 1044, 1252, 1255, 1268, 1321, 1451, 1454-1460, 1497-1499, 1538, 1539, 1581, 1582, 1587, 1601, 1602, 1606, 1607, 1610, 1631-1633, 1719, 1721, 1730, 1731, 1861, or 2068.

26. The oligonucleotide of any one of claims 1-6, wherein the oligonucleotide consists of the nucleobase sequence of any one of SEQ ID NOs: 479, 482-491, 770, 771, 973, 998-1000, 1007, 1008, 1040-1043, 1387, 1454, 1456, 1459-1461, 1538, 1539, 1606, 1607, 1610, 1643-1665, 1668-1675, or 1862-1869.

27. The oligonucleotide of any one of claims 1-26, wherein the oligonucleotide exhibits at least 50% mRNA inhibition at a 20 nM oligonucleotide concentration when determined using a cell assay when compared with a control cell.

28. The oligonucleotide of any one of claims 1-26, wherein the oligonucleotide exhibits at least 60% mRNA inhibition at a 20 nM oligonucleotide concentration when determined using a cell assay when compared with a control cell.

29. The oligonucleotide of any one of claims 1-26, wherein the oligonucleotide exhibits at least 70% mRNA inhibition at a 20 nM oligonucleotide concentration when determined using a cell assay when compared with a control cell.

30. The oligonucleotide of any one of claims 1-26, wherein the oligonucleotide exhibits at least 85% mRNA inhibition at a 20 nM oligonucleotide concentration when determined using a cell assay when compared with a control cell.

31. The oligonucleotide of any one of claims 1-26, wherein the oligonucleotide exhibits at least 50% mRNA inhibition at a 2 nM when determined using a cell assay when compared with a control cell.

32. The oligonucleotide of any one of claims 1-26, wherein the oligonucleotide exhibits at least 60% mRNA inhibition at a 2 nM oligonucleotide concentration when determined using a cell assay when compared with a control cell.

33. The oligonucleotide of any one of claims 1-26, wherein the oligonucleotide exhibits at least 70% mRNA inhibition at a 2 nM oligonucleotide concentration when determined using a cell assay when compared with a control cell.

34. The oligonucleotide of any one of claims 1-26, wherein the oligonucleotide exhibits at least 85% mRNA inhibition at a 2 nM oligonucleotide concentration when determined using a cell assay when compared with a control cell.

35. The oligonucleotide of any one of claims 1-34, wherein the oligonucleotide comprises at least one alternative internucleoside linkage.

36. The oligonucleotide of claim 35, wherein the at least one alternative internucleoside linkage is a phosphorothioate internucleoside linkage.

37. The oligonucleotide of claim 35, wherein the at least one alternative internucleoside linkage is a 2′-alkoxy internucleoside linkage.

38. The oligonucleotide of claim 35, wherein the at least one alternative internucleoside linkage is an alkyl phosphate internucleoside linkage.

39. The oligonucleotide of any one of claims 1-38, wherein the oligonucleotide comprises at least one alternative nucleobase.

40. The oligonucleotide of claim 39, wherein the alternative nucleobase is 5′-methylcytosine, pseudouridine, or 5-methoxyuridine.

41. The modified oligonucleotide of any one of claims 1-40, wherein the oligonucleotide comprises at least one alternative sugar moiety.

42. The modified oligonucleotide of claim 41, wherein the alternative sugar moiety is 2′-OMe or a bicyclic nucleic acid.

43. The oligonucleotide of any one of claims 1-42, wherein the oligonucleotide further comprises a ligand conjugated to the 5′ end or the 3′ end of the oligonucleotide through a monovalent or branched bivalent or trivalent linker.

44. The oligonucleotide of any one of claims 1-43, wherein oligonucleotide comprises a region complementary to at least 17 contiguous nucleotides of a MSH3 gene.

45. The oligonucleotide of any one of claims 1-43, wherein oligonucleotide comprises a region complementary to at least 19 contiguous nucleotides of a MSH3 gene.

46. The oligonucleotide of any one of claims 1-43, wherein the oligonucleotide comprises a region complementary to 19 to 23 contiguous nucleotides of a MSH3 gene.

47. The oligonucleotide of any one of claims 1-43, wherein the oligonucleotide comprises a region complementary to 19 contiguous nucleotides of a MSH3 gene.

48. The oligonucleotide of any one of claims 1-43, wherein the oligonucleotide comprises a region complementary to 20 contiguous nucleotides of a MSH3 gene.

49. The oligonucleotide of any one of claims 1-43, wherein the oligonucleotide is from about 15 to 25 nucleosides in length.

50. The oligonucleotide of any one of claims 1-43, wherein the oligonucleotide is 20 nucleosides in length.

51. A pharmaceutical composition comprising one or more of the oligonucleotides of any one of claims 1-50 and a pharmaceutically acceptable carrier or excipient.

52. A composition comprising one or more of the oligonucleotides of any one of claims 1-50 and a lipid nanoparticle, a polyplex nanoparticle, a lipoplex nanoparticle, or a liposome.

53. A method of inhibiting transcription of MSH3 in a cell, the method comprising contacting the cell with one or more of the oligonucleotides of any one of claims 1-50, the pharmaceutical composition of claim 51, or the composition of claim 52 for a time sufficient to obtain degradation of an mRNA transcript of a MSH3 gene, inhibits expression of the MSH3 gene in the cell.

54. A method of treating, preventing, or delaying the progression a trinucleotide repeat expansion disorder in a subject in need thereof, the method comprising administering to the subject one or more of the oligonucleotides of any one of claims 1-50, the pharmaceutical composition of claim 51, or the composition of claim 52.

55. A method of reducing the level and/or activity of MSH3 in a cell of a subject identified as having a trinucleotide repeat expansion disorder, the method comprising contacting the cell with one or more of the oligonucleotides of any one of claims 1-50, the pharmaceutical composition of claim 51, or the composition of claim 52.

56. A method for inhibiting expression of an MSH3 gene in a cell comprising contacting the cell with one or more of the oligonucleotides of any one of claims 1-50, the pharmaceutical composition of claim 51, or the composition of claim 52 and maintaining the cell for a time sufficient to obtain degradation of a mRNA transcript of an MSH3 gene, thereby inhibiting expression of the MSH3 gene in the cell.

57. A method of decreasing trinucleotide repeat expansion in a cell, the method comprising contacting the cell with one or more of the oligonucleotides of any one of claims 1-50, the pharmaceutical composition of claim 51, or the composition of claim 52.

58. The method of claim 56 or 57, wherein the cell is in a subject.

59. The method of any one of claims 54, 55, and 58, wherein the subject is a human.

60. The method of any one of claims 54-58, wherein the cell is a cell of the central nervous system or a muscle cell.

61. The method of any one of claims 54, 55, and 58-60, wherein the subject is identified as having a trinucleotide repeat expansion disorder.

62. The method of any one of claims 54, 55, and 57-61, wherein the trinucleotide repeat expansion disorder is a polyglutamine disease.

63. The method of claim 62, wherein the polyglutamine disease is selected from the group consisting of dentatorubropallidoluysian atrophy, Huntington's disease, spinal and bulbar muscular atrophy, spinocerebellar ataxia type 1, spinocerebellar ataxia type 2, spinocerebellar ataxia type 3, spinocerebellar ataxia type 6, spinocerebellar ataxia type 7, spinocerebellar ataxia type 17, and Huntington's disease-like 2.

64. The method of any one of claims 54-61, wherein the trinucleotide repeat expansion disorder is a non-polyglutamine disease.

65. The method of claim 64, wherein the non-polyglutamine disease is selected from the group consisting of fragile X syndrome, fragile X-associated tremor/ataxia syndrome, fragile XE mental retardation, Friedreich's ataxia, myotonic dystrophy type 1, spinocerebellar ataxia type 8, spinocerebellar ataxia type 12, oculopharyngeal muscular dystrophy, Fragile X-associated premature ovarian failure, FRA2A syndrome, FRA7A syndrome, and early infantile epileptic encephalopathy.

66. One or more oligonucleotides of any one of claims 1-50, the pharmaceutical composition of claim 51, or the composition of claim 52 for use in the prevention or treatment of a trinucleotide repeat expansion disorder.

67. The oligonucleotide, pharmaceutical composition, or composition for the use of claim 68, wherein the trinucleotide repeat expansion disorder is selected from the group consisting of dentatorubropallidoluysian atrophy, Huntington's disease, spinal and bulbar muscular atrophy, spinocerebellar ataxia type 1, spinocerebellar ataxia type 2, spinocerebellar ataxia type 3, spinocerebellar ataxia type 6, spinocerebellar ataxia type 7, spinocerebellar ataxia type 17, Huntington's disease-like 2, fragile X syndrome, fragile X-associated tremor/ataxia syndrome, fragile XE mental retardation, Friedreich's ataxia, myotonic dystrophy type 1, spinocerebellar ataxia type 8, spinocerebellar ataxia type 12, oculopharyngeal muscular dystrophy, Fragile X-associated premature ovarian failure, FRA2A syndrome, FRA7A syndrome, and early infantile epileptic encephalopathy.

68. The oligonucleotide, pharmaceutical composition, or composition for the use of claim 66 or 67, wherein the trinucleotide repeat expansion disorder is Huntington's disease.

69. The oligonucleotide, pharmaceutical composition, or composition of claim 66 or 67, wherein the trinucleotide repeat expansion disorder is Friedreich's ataxia.

70. The oligonucleotide, pharmaceutical composition, or composition for the use of claim 66 or 67, wherein the trinucleotide repeat expansion disorder is myotonic dystrophy type 1.

71. The oligonucleotide, pharmaceutical composition, or composition of any of claims 66-70, wherein the modified oligonucleotide, pharmaceutical composition, or composition is administered intrathecally.

72. The oligonucleotide, pharmaceutical composition, or composition of any of claims 66-70, wherein the modified oligonucleotide, pharmaceutical composition, or composition is administered intraventricularly.

73. The oligonucleotide, pharmaceutical composition, or composition of any of claims 66-70, wherein the oligonucleotide, pharmaceutical composition, or composition is administered intramuscularly.

74. A method of treating, preventing, or delaying the progression a disorder in a subject in need thereof wherein the subject is suffering from trinucleotide repeat expansion disorder, comprising administering to said subject one or more of the oligonucleotides of any one of claims 1-50, the pharmaceutical composition of claim 51, or the composition of claim 52.

75. The method of claim 74, further comprising administering an additional therapeutic agent.

76. The method of claim 75, wherein the additional therapeutic agent is another oligonucleotide that hybridizes to an mRNA encoding the Huntingtin gene.

77. A method of preventing or delaying the progression of a trinucleotide repeat expansion disorder in a subject, the method comprising administering to the subject one or more of the oligonucleotides of any one of claims 1-50, the pharmaceutical composition of claim 51, or the composition of claim 52 in an amount effective to delay progression of a trinucleotide repeat expansion disorder of the subject.

78. The method of claim 77, wherein the trinucleotide repeat expansion disorder is selected from the group consisting of dentatorubropallidoluysian atrophy, Huntington's disease, spinal and bulbar muscular atrophy, spinocerebellar ataxia type 1, spinocerebellar ataxia type 2, spinocerebellar ataxia type 3, spinocerebellar ataxia type 6, spinocerebellar ataxia type 7, spinocerebellar ataxia type 17, Huntington's disease-like 2, fragile X syndrome, fragile X-associated tremor/ataxia syndrome, fragile XE mental retardation, Friedreich's ataxia, myotonic dystrophy type 1, spinocerebellar ataxia type 8, spinocerebellar ataxia type 12, oculopharyngeal muscular dystrophy, Fragile X-associated premature ovarian failure, FRA2A syndrome, FRA7A syndrome, and early infantile epileptic encephalopathy.

79. The method of claim 77 or 78, wherein the trinucleotide repeat expansion disorder is Huntington's disease.

80. The method of claim 77 or 78, wherein the trinucleotide repeat expansion disorder is Friedrich's ataxia.

81. The method of claim 77 or 78, wherein the trinucleotide repeat expansion disorder is myotonic Dystrophy type 1.

82. The method of claim 77 or 78, further comprising administering an additional therapeutic agent.

83. The method of claim 82, wherein the additional therapeutic agent is an oligonucleotide that hybridizes to an mRNA encoding the Huntingtin gene.

84. The method of any of claims 77-83, wherein progression of the trinucleotide repeat expansion disorder is delayed by at least 120 days, for example, at least 6 months, at least 12 months, at least 2 years, at least 3 years, at least 4 years, at least 5 years, at least 10 years or more, when compared with a predicted progression.

85. One or more oligonucleotides of any one of claims 1-50, the pharmaceutical composition of claim 51, or the composition of claim 52, for use in preventing or delaying progression of a trinucleotide repeat expansion disorder in a subject.

86. The oligonucleotide, pharmaceutical composition, or composition of claim 85, wherein the trinucleotide repeat expansion disorder is selected from the group consisting of dentatorubropallidoluysian atrophy, Huntington's disease, spinal and bulbar muscular atrophy, spinocerebellar ataxia type 1, spinocerebellar ataxia type 2, spinocerebellar ataxia type 3, spinocerebellar ataxia type 6, spinocerebellar ataxia type 7, spinocerebellar ataxia type 17, Huntington's disease-like 2, fragile X syndrome, fragile X-associated tremor/ataxia syndrome, fragile XE mental retardation, Friedreich's ataxia, myotonic dystrophy type 1, spinocerebellar ataxia type 8, spinocerebellar ataxia type 12, oculopharyngeal muscular dystrophy, Fragile X-associated premature ovarian failure, FRA2A syndrome, FRA7A syndrome, and early infantile epileptic encephalopathy.

87. The oligonucleotide, pharmaceutical composition, or composition of claim 85 or 86, wherein the trinucleotide repeat expansion disorder is Huntington's disease.

88. The oligonucleotide, pharmaceutical composition, or composition of claim 85 or 86, wherein the trinucleotide repeat expansion disorder is Friedrich's ataxia.

89. The oligonucleotide, pharmaceutical composition, or composition of claim 85 or 86, wherein the trinucleotide repeat expansion disorder is myotonic Dystrophy type 1.

90. The oligonucleotide, pharmaceutical composition, or composition of any one of claims 85-89, wherein progression of the trinucleotide repeat expansion disorder is delayed by at least 120 days, for example, at least 6 months, at least 12 months, at least 2 years, at least 3 years, at least 4 years, at least 5 years, at least 10 years or more, when compared with a predicted progression.

The application's sequence listing, which the Patent Office published only in electronic form, follows.

SEQUENCE LISTING (2545 sequences)

SEQ ID NO: 1 - DNA, 4472 bp, Homo sapiens
ccgcagacgcctgggaactgcggccgcgggctcgcgctcctcgccaggccctgccgccgggctgccatccttgccctgccatgtctcgccggaagcctgcgtcgggcggcctcgctgcctccagctcagcccctgcgaggcaagcggttttgagccgattcttccagtctacgggaagcctgaaatccacctcctcctccacaggtgcagccgaccaggtggaccctggcgctgcagcggctgcagcggccgcagcggccgcagcgcccccagcgcccccagctcccgccttcccgccccagctgccgccgcacatagctacagaaattgacagaagaaagaagagaccattggaaaatgatgggcctgttaaaaagaaagtaaagaaagtccaacaaaaggaaggaggaagtgatctgggaatgtctggcaactctgagccaaagaaatgtctgaggaccaggaatgtttcaaagtctctggaaaaattgaaagaattctgctgcgattctgcccttcctcaaagtagagtccagacagaatctctgcaggagagatttgcagttctgccaaaatgtactgattttgatgatatcagtcttctacacgcaaagaatgcagtttcttctgaagattcgaaacgtcaaattaatcaaaaggacacaacactttttgatctcagtcagtttggatcatcaaatacaagtcatgaaaatttacagaaaactgcttccaaatcagctaacaaacggtccaaaagcatctatacgccgctagaattacaatacatagaaatgaagcagcagcacaaagatgcagttttgtgtgtggaatgtggatataagtatagattctttggggaagatgcagagattgcagcccgagagctcaatatttattgccatttagatcacaactttatgacagcaagtatacctactcacagactgtttgttcatgtacgccgcctggtggcaaaaggatataaggtgggagttgtgaagcaaactgaaactgcagcattaaaggccattggagacaacagaagttcactcttttcccggaaattgactgccctttatacaaaatctacacttattggagaagatgtgaatcccctaatcaagctggatgatgctgtaaatgttgatgagataatgactgatacttctaccagctatcttctgtgcatctctgaaaataaggaaaatgttagggacaaaaaaaagggcaacatttttattggcattgtgggagtgcagcctgccacaggcgaggttgtgtttgatagtttccaggactctgcttctcgttcagagctagaaacccggatgtcaagcctgcagccagtagagctgctgcttccttcggccttgtccgagcaaacagaggcgctcatccacagagccacatctgttagtgtgcaggatgacagaattcgagtcgaaaggatggataacatttattttgaatacagccatgctttccaggcagttacagagttttatgcaaaagatacagttgacatcaaaggttctcaaattatttctggcattgttaacttagagaagcctgtgatttgctctttggctgccatcataaaatacctcaaagaattcaacttggaaaagatgctctccaaacctgagaattttaaacagctatcaagtaaaatggaatttatgacaattaatggaacaacattaaggaatctggaaatcctacagaatcagactgatatgaaaaccaaaggaagtttgctgtgggttttagaccacactaaaacttcatttgggagacggaagttaaagaagtgggtgacccagccactccttaaattaagggaaataaatgcccggcttgatgctgtatcggaagttctccattcagaatctagtgtgtttggtcagatagaaaatcatctacgtaaattgcccgacatagagaggggactctgtagcatttatcacaaaaaatgttctacccaagagttcttcttgattgtcaaaactttatatcacctaaagtcagaatttcaagcaataatacctgctgttaattcccacattcagtcagacttgctccggaccgttattttagaaattcctgaactcctcagtccagtggagcattacttaaagatactcaatgaacaagctgccaaagttggggataaaactgaattatttaaagacctttctgacttccctttaataaaaaagaggaaggatgaaattcaaggtgttattgacgagatccgaatgcatttgcaagaaatacgaaaaatactaaaaaatccttctgcacaatatgtgacagtatcaggacaggagtttatgatagaaataaagaactctgctgtatcttgtataccaactgattgggtaaaggttggaagcacaaaagctgtgagccgctttcactctccttttattgtagaaaattacagacatctgaatcagctccgggagcagctagtccttgactgcagtgctgaatggcttgattttctagagaaattcagtgaacattatcactccttgtgtaaagcagtgcatcacctagcaactgttgactgcattttctccctggccaaggtcgctaagcaaggagattactgcagaccaactgtacaagaagaaagaaaaattgtaataaaaaatggaaggcaccctgtgattgatgtgttgctgggagaacaggatcaatatgtcccaaataatacagatttatcagaggactcagagagagtaatgataattaccggaccaaacatgggtggaaagagctcctacataaaacaagttgcattgattaccatcatggctcagattggctcctatgttcctgcagaagaagcgacaattgggattgtggatggcattttcacaaggatgggtgctgcagacaatatatataaaggacagagtacatttatggaagaactgactgacacagcagaaataatcagaaaagcaacatcacagtccttggttatcttggatgaactaggaagagggacgagcactcatgatggaattgccattgcctatgctacacttgagtatttcatcagagatgtgaaatccttaaccctgtttgtcacccattatccgccagtttgtgaactagaaaaaaattactcacaccaggtggggaattaccacatgggattcttggtcagtgaggatgaaagcaaactggatccaggcgcagcagaacaagtccctgattttgtcaccttcctttaccaaataactagaggaattgcagcaaggagttatggattaaatgtggctaaactagcagatgttcctggagaaattttgaagaaagcagctcacaagtcaaaagagctggaaggattaataaatacgaaaagaaagagactcaagtattttgcaaagttatggacgatgcataatgcacaagacctgcagaagtggacagaggagttcaacatggaagaaacacagacttctcttcttcattaaaatgaagactacatttgtgaacaaaaaatggagaattaaaaataccaactgtacaaaataactctccagtaacagcctatctttgtgtgacatgtgagcataaaattatgaccatggtatattcctattggaaacagagaggtttttctgaagacagtctttttcaagtttctgtcttcctaacttttctacgtataaacactcttgaatagacttccactttgtaattagaaaattttatggacagtaagtccagtaaagccttaagtggcagaatataattcccaagcttttggagggtgatataaaaatttacttgatatttttatttgtttcagttcagataattggcaactgggtgaatctggcaggaatctatccattgaactaaaataattttattatgcaaccagtttatccaccaagaacataagaattttttataagtagaaagaattggccaggcatggtggctcatgcctgtaatcccagcactttgggaggccaaggtaggcagatcacctgaggtcaggagttcaagaccagcctggccaacatggcaaaaccccatctttactaaaaatataaagtacatctctactaaaaatacgaaaaaattagctgggcatggtggcgcacacctgtagtcccagctactccggaggctgaggcaggagaatctcttgaacctgggaggcggaggttgcaatgagccgagatcacgtcactgcactccagcttgggcaacagagcaagactccatctcaaaaaaaaaaaaagaaaaaagaaaagaaatagaattatcaagcttttaaaaactagagcacagaaggaataaggtcatgaaatttaaaaggttaaatattgtcataggattaagcagtttaaagattgttggatgaaattatttgtcattcattcaagtaataaatatttaatgaatacttgctataaaaaaaaaaaaaaaaaaaaaaaaaa

SEQ ID NO: 2 - protein, 1137 aa, Homo sapiens
MSRRKPASGGLAASSSAPARQAVLSRFFQSTGSLKSTSSSTGAADQVDPGAAAAAAAAAAAAPPAPPAPAFPPQLPPHIATEIDRRKKRPLENDGPVKKKVKKVQQKEGGSDLGMSGNSEPKKCLRTRNVSKSLEKLKEFCCDSALPQSRVQTESLQERFAVLPKCTDFDDISLLHAKNAVSSEDSKRQINQKDTTLFDLSQFGSSNTSHENLQKTASKSANKRSKSIYTPLELQYIEMKQQHKDAVLCVECGYKYRFFGEDAEIAARELNIYCHLDHNFMTASIPTHRLFVHVRRLVAKGYKVGVVKQTETAALKAIGDNRSSLFSRKLTALYTKSTLIGEDVNPLIKLDDAVNVDEIMTDTSTSYLLCISENKENVRDKKKGNIFIGIVGVQPATGEVVFDSFQDSASRSELETRMSSLQPVELLLPSALSEQTEALIHRATSVSVQDDRIRVERMDNIYFEYSHAFQAVTEFYAKDTVDIKGSQIISGIVNLEKPVICSLAAIIKYLKEFNLEKMLSKPENFKQLSSKMEFMTINGTTLRNLEILQNQTDMKTKGSLLWVLDHTKTSFGRRKLKKWVTQPLLKLREINARLDAVSEVLHSESSVFGQIENHLRKLPDIERGLCSIYHKKCSTQEFFLIVKTLYHLKSEFQAIIPAVNSHIQSDLLRTVILEIPELLSPVEHYLKILNEQAAKVGDKTELFKDLSDFPLIKKRKDEIQGVIDEIRMHLQEIRKILKNPSAQYVTVSGQEFMIEIKNSAVSCIPTDWVKVGSTKAVSRFHSPFIVENYRHLNQLREQLVLDCSAEWLDFLEKFSEHYHSLCKAVHHLATVDCIFSLAKVAKQGDYCRPTVQEERKIVIKNGRHPVIDVLLGEQDQYVPNNTDLSEDSERVMIITGPNMGGKSSYIKQVALITIMAQIGSYVPAEEATIGIVDGIFTRMGAADNIYKGQSTFMEELTDTAEIIRKATSQSLVILDELGRGTSTHDGIAIAYATLEYFIRDVKSLTLFVTHYPPVCELEKNYSHQVGNYHMGFLVSEDESKLDPGAAEQVPDFVTFLYQITRGIAARSYGLNVAKLADVPGEILKKAAHKSKELEGLINTKRKRLKYFAKLWTMHNAQDLQKWTEEFNMEETQTSLLH

SEQ ID NO: 3 - DNA, 3945 bp, Mus musculus
ccaaggccggtcccgcacaggttgaggcgtgcgcgcgcgcaggcgcgagaaagtgcggccgcgcgctcgcgctcctagcaggccggctcttctgcacactgcaatgccccgcgggaaatccgcgtcgggaggctctactgccgccggcccaggcccggggaggcaaacggttctaagccggttcttcaggtctgcgggaagcctaagatccagcgcgtcctccacggagccagcagagaaggtgacagaaggtgacagcaggaagaggtcactgggaaatggtgggcccactaagaaaaaagcaaggaaagttccagagaaggaggaagaaaacatctcagtagcagctcaccaccctgaggcaaagaaatgtctgaggcccaggattgttttaaagtccctggaaaagttgaaagaattctgctgtgattctgccctccctcaaaacagagtccagacagaagctcttcgggagagacttgaagttctgccaaggtgtactgattttgaagatatcactctgcaacgtgcaaagaatgcggttttgtccgaagattccaaatctcaggctaatcagaaagacagtcaatttggaccctgccctgaagttttccagaagacttccgattgtaaaccttttaacaagcgatccaagagcgtctatacaccgttagaactgcagtacttagatatgaagcagcagcataaagacgcagttttgtgtgtggagtgtggttacaagtacagattctttggggaagatgcagaaattgctgcccgggaactcaatatttattgccacttagaccacaactttatgactgcaagcatacctacccacagactgttcgtgcatgtccgccgacttgtggccaaagggtacaaggtgggagttgtgaagcaaactgaaactgccgcattaaaggccatcggagacaataaaagttctgtcttctcccggaaattgaccgctctttatacgaaatccacacttattggtgaagatgtgaatcctctcatcaggctggatgattctgtaaatatcgatgaggtaatgacagatacatctaccaactatcttctgtgtatctacgaagaaaaggagaacattaaagacaaaaagaaggggaacctttccgttggtatcgtgggagtgcagcccgcaactggcgaggttgtgtttgactgcttccaggactctgcttccagactggagctggagactcgcatatcaagcctgcagcctgtggaattactgcttccctccgacctgtctgtgccaacagagatgctcatccaaagagccaccaatgtcagtgtgcgggatgacaggattcgagtagaaaggatgaataatacttactttgaatacagccatgctttccagacagttacggagttttatgctagagagatagttgacagccagggctctcagagtctctctggtgtcattaacttggagaagcctgtgatctgcgccttggctgccgtaataaggtacctcaaggaatttaacctggaaaagatgctgtccaaacccgagagttttaaacagctgtcaagtggaatggaattcatgagaattaatgggaccacgctaaggaatctggagatccttcagaatcagactgatatgaagaccaaaggaagcttgctttgggttttagaccacactaaaacttcatttgggagaaggaagttaaagaattgggttacccagccactgcttaaattaagggaaataaatgcccgacttgatgcagtatctgatgttctccactcagaatccagtgtgtttgagcagatagaaaaccttcttcgtaagttaccggatgtcgagagaggactatgtagcatttatcacaagaagtgctctacccaagagttcttcttgatcgtcaaaagcctatgtcaactgaagtcagagcttcaagcattaatgcctgctgttaattcccacgttcagtccgacttactccgagcactcatcgtggaggctcctgagctcctcagcccagtggaacattacttaaaggttctgaatgggccagctgccaaagttggcgataaaactgaattattcaaagacctctctgacttccctttaataaaaaagaggaaaaatgaaattcaggaagtcattcacagcatccaaatgcgtttacaggaatttcggaaaatattaaaacttccttctttacagtatgtgactgtatcaggacaagagtttatgattgaaataaagaactcggctgtatcttgcatcccagctgattgggtgaaggttggaagcacaaaagctgtgagccgctttcaccctcccttcatcgtggaaagctacagacgtctgaatcagctccgggagcagctagtccttgactgcaatgctgaatggcttggcttcctagagaattttggtgaacattatcacactttgtgtaaggctgtggatcacctagcaactgttgactgtattttctccctggccaaggtcgctaaacaaggaaattactgcaggccaactctacaagaagaaaagaagatcatcataaaaaatggaaggcaccctatgattgatgtgttgctgggtgaacaagatcagtttgtgcccaacagtacgagtttatcacaggactcggagagagtaatgataatcaccggaccaaacatgggtgggaaaagctcctacataaaacaggttgcactggttaccatcatggctcagattggctcctacgtccctgcagaggaagccacaattgggattgtggatggcattttcacaaggatgggtgctgcagacaatatatacaaaggccggagtactttcatggaagaactgacggacacagcggaaataatcaggagagcgtccccacagtccttggttatcctggatgagctggggagagggacaagcacccatgacggaatcgccatcgcctatgcaactctagagtattttatcagagacgtgaaatccttaacactgttcgttacccactatccaccagtctgtgaactagaaaaatgttacccagaacaagtggggaattaccacatgggattcttggtcaatgaagatgaaagcaagcaggactcaggtgacatggagcagatgccggattctgtcacttttctctatcagataacccgaggaattgcagcgagaagttatggacttaatgtggcgaagttagcagatgtacctagagaagtcttacagaaagccgcgcacaagtctaaggagctggaaggcttagtcagcctgagaaggaaaaggcttgaatgttttaccgacttatggacgacacacagtgtgaaggacctgcacacatgggcagataagctggaaatggaggaaatacagacttctctcccacattaaaatgaaaactgcatttttggagtaaaatacagagaactgaagattcaaactgtacaaaacaactctgtggcaacagccgtctctgtggtcttccttttgagatggcttctgctctgtgaagggagcttttcaggctcttgtcctcctgctttcagaagaaaaagacaatggagtgtaaaggcctcaattttcctaggcagtacatttcataccaaagcgggttcttctaagtaaaacctaaaacggaggttcttggtgcctacattatcagaggggcagtgcctatttaggttcagacaattgacaacaggctaatctgacaggaacctacttttgtgagaactaaagaactttataatgccagggtttgctcaccaaacacataaacgtttttatgagaaggagaatcgcgaagcttctagaagccagagcacaggaaggaaaggccacatgaagtgtgaagggctaaatgtcgtcatctttttaacagcttgaaggttggtgtataaaattattttgtcatttacttaaataaaaatatggaatgaatactt

SEQ ID NO: 4 - DNA, 3780 bp, Rattus norvegicus
atgccccgcaggaaatccgcgtcgggaggctctaatgccgccggcccagacccggggaggcaagtggttctgagccggttcttcaagtctgcgggaagcctaagatccagcgtgtcccccacagaaccagcagagaaggtgacagaaggtgacagcaggaagaggtcactggggaatggtgagcccactaacaagaaagcaaagaaagttccagaggaggaaggagaaaatacctcagtagcatctcacaatcctgagccaaagaaatgtctgaggcccaggattgtttcaaagtccctggaaaagttgaaagaattctgctgtgattctgccctccctcaaaacagagtccagacagaagccctttgggagagacttgcagttctgccaaagtgtactgatttcgaagatatcactctgcaacgtgcaaagaatgcggttttgtccgaagattccaagtctcaggctaatcagaaagacactcaatttggaccttcccctgaagctttccagaagacttccacttgtaaaccttttaacaggcggtccaagagcatctatactccactagaactgcagtaccttgatgtgaagcagctgcataaagacgcggttttgtgtgtggaatgtgggtacaagtacaggttctttggggaagatgcagaaattgctgcccgggaactcaatatttattgccacttggaccacaactttatgacggcgagcatacccacccacagactgttcgtgcatgtccgccgactggtggccaaaggatacaaggtgggagttgtgaagcaaactgaaactgcggcattaaaggccattggagacaataaaagttctgtcttttcccggaaattgactgctctttatacgaaatccacactgattggagaagatgtgaatcctctgatcaggctggatgattctgtaaatattgatgaggcagtgacggatacttctaccaactatcttctgtgtatctacgaagaaaaggaaaacattaaagacaaaaagaaggggaacatttcttttggcatcgtgggagtgcagcctgcgacgggcgaggtcgtgttcgactgcttccaggactcggcttccagactggagctggagactcgaacagcaagcctgcagcccgtggagctgctgctcccctcacagctgtccgagccaacggagatgctcatccgtagagccaccgctgtcagtgttggggatgacagaattcgagtagaaaggatgaataatactcactttgaatacagccatgctttccagacagttatggagttctatgccagagagacagttgacacccagggctctcagagcctgtctggtgtcattcacttggagaagcctgtgatctgcgccctggctgccataatacggtacctcaaggaatttaacttggacaaggtgctgtccaaacccgagaattttaaacagctgtcaagtggaatggaattcatgagaatcaatggaacaacgctaaggaatctggaaatcctacagaatcagactgatatgaagaccagaggaagtttgctttgggttttagaccacactaaaacctcatttgggagaaggaagttaaaaaaatgggttacccaaccattgcttaaattaagggacataaatgcccgacttgatgcaatatccgatgttctccactcagaatccagtgtgtttgaacagatagaaaaccttctacggaaactaccggatgtcgagagaggactgtgtagcatttatcacaagaagtgctctactcaggagttcttcttgatcgtcaaaaacctgtgtcaactcaaatcagagcttcaagcgttaatgcctgctgttaattcccacgtacagtcagacttgctccgagcacgcgtcttagaagtgcctgagctcctcagtccagtggagccttatttaaaggttctgaatgaacaagctgccaaagctggcgataaaactgaattattcaaagacctctctgacttccctttaataaaaaagaggaaaaatgaaattcaagaagtcattcacagcatccaaatgcatttacaagaattgcgaaaaatattaaaacttccttctttacaatatgtgactgtatcaggacaagagtttatggttgaaataaagaactcagctgtgtcttgcgtcccgactgactgggtgaaggttggaagcacaaaagctgtgagccgctttcactctccttttgtcgtggaaaactacagacgtctgaatcaactccgggagcagctagtccttgactgcaatgctgaatggcttgactttctagagaattttggtgaacattaccacactttgtgtaaggccgtggatcacctagcaactgtggactgcattttctccctggccaaggtcgccaagcaaggaagttactgcaggccaactctacaagaagaaaagaaaatcatcataaaaaatggaaggcaccctatgattgatgtgttgctgggtgaacaagatcagtttgtgcccaacagtacaaatttatcacaggactctgagagagtaatgataatcaccggaccgaacatgggtggcaagagctcctacataaaacaggttgctctggttgtgatcatggctcagatcggctcctacgttcctgcagaggaagccacaattgggattgtggacggcattttcacaaggaggggtgctgcagacaatatatacaaaggccggagtactttcatggaagagctgacagacacggcggagataatccagaaagcaacacagcggtccctggttatcctggacgagctgggaagagggaccagcacccacgacggaatcgccattgcctatgcgactctagagtattttatcagagacgtgaaatccttaaccctgttcgtcacccactatccaccagtctgtgaactagagaaacgttacccagagcaggtggggaattaccacatgggcttcttggtcaatgaggacggaagcaagcaggactcaggtgacatggagcagatgccggactctgtcactttcctctatcagataaccagaggaattgcagcgaggagttacggactgaatgtggcgaagctagcagatgtgcccagagaaatcttacagaaagctgctcacaagtctaaagagctggaaggcttagtcaatctgagaaggaaaagacttgaatattttatagatctgtggacgacacatagtgtaaaggacctgcacacgcgggcagctgagctggaaatacaggaaatacagacgtctccccacaatgaaatgaaaactacacttttggagctgaagtagcactgtatgatcatgcgagccagtggccgactggagatacaaactgaacaaacagctttgaggtagcagctgtcagtggcgtgagcacggaggaagagcgacgtcttccctttgagctggttccttctctgtgaagggggagcttttcaggctctcgtcctccgcactcggtgcctgcacagccagagcggcagtgtcatttccgctcagacagctgaccgcagggtaacctgacagggatcttttgtgagaactgaagattttataatgctagcggtttgttcaccaaagccatgagcatttttatgaggagtagaatcatgaagcttctagaatccagagcacagggaggaaacagccatatgaacttggaggacctaagagtagctgtcactttaaacagctgcggtcgttaaataaaattattttgtcatcacttattggaataaatacttgctcaga

SEQ ID NO: 5 - DNA, 6078 bp, Macaca fascicularis
ctgggaactgcggccgcgggctcgcgctcccggcagggccctgttcccgggctgccatccttgccctgccatgtctcgccggaagcctgcgttgggcggcctcgctgcctccagcccagtccctgcgaggcaagctgttttgagccgattcttccagtctacgggaagcctgaaatccacctcctcccccacgggtgcaaccgatcaggtggaccgtgacgccgcagcgcccccagcgtccactttcccgccccagctgccgccgctcgtggctccagaaattgacagaagtaagaagagaccattggaaaatgatgggcctgttaaaaagaaagtaaagaaagcccaacaaaaggaaggaggaagtgatctgggaatgtctggcaactctgagccaaagaaatgtctgaggaccaggaatgttttaaagtctctggaaaaattgaaagaattctgctgtgattctgcccttcctcaaagtagagtccagacagaatctctgcaggagagatttgcagttctgccaaaatgtactgattttgatgatatcagtcttctacgtgcaaagaatgcagtttcttctgaagattcgaaatgtcaaattaaacaaaaggatacaacactttttgatgtcagtcagtttggatcatcaaatacaagtcatgaaaatttacagaaaactgcttctaaaccagctaacaaacgttccaaaagcatttatacgccgctagaattacaatacatagaaatgaagcagcagcacaaagatgcagttttgtgtgtggaatgtggatataagtatagattctttggggaagatgcagagattgcagcccgagagctcaatatttattgccatttagatcacaactttatgacagcaagtatacctactcacagactgtttgttcatgtacgccgcctggtggcaaaaggatataaggtgggagttgtgaagcaaactgaaactgcagcattaaaggccattggagacaacagaagttcactcttttcccggaaattgactgccctttatacaaaatctacactcattggagaagatgtgaatcccctaatcaagctggatgatgctgtaaatgttgatgagataatgactgatacttctaccagctatcttctgtgcatctctgaaaataaggaaaatgttagggacaaaaaaaagggcatcgtttttattggcattgtgggagtgcagcctgccacaggcgaggttgtgtttgatagtttccaggactctgcttctcgttcagagctagaaacccggatgtcaaacctgcagccagtagagctgctgcttccttcggccttgtccgagcaaacagagatgctcatccacagagccacatctgttagtgtgcaggatgacagaattcgagttgaaaggatggataacatttattttgaatacagccatgctttccaggcagttacagagttttatgcaaaagacacagttgacatcaaaggttctcaaattatttctggcattgttaacttagagaagcctgtgatttgctctttggctgccatcataaaatacctcaaagaattcaacttggaaaaaatgctctccaaacctgagaattttaaacagctatcaagtaaaatggaatttatgacaattaatggaacaacattaaggaatctggaaatcctacagaatcagactgatatgaaaaccaaaggaagtttgctgtgggttttagaccacactaaaacttcatttgggagacggaagttaaagaagtgggtgacccagccactccttaaattaagggaaataaatgcccggcttgatgctgtatctgaagttctccattcagaatctagtgtgtttggtcagatagaaaatcatctacgtaaattgcctgacatagagagaggactctgtagcatttatcacaaaaaatgttctacccaagagttcttcttgattgtcaaaaccttatatcacctaaagtcagaatttcaagcaataatacctgctgttaattcccacgttcagtcagacttgctccgcaccgttattttagaaattcctgaactcctcagtccagtggagcattacttaaagatactcaatgaacaagctgccaaagttggggataaaactgaattatttaaagacctttctgacttccctttaataaaaaagaggaaggatgaaattcaaggtgttagtgacaagatccgaatgcatttgcaagaaatacgaaaaatactaaaaaatccttctgcacaatatgtgacagtatcaggacaggagtttatgatcgaaataaagaactctgctgtatcttgtataccaactgattgggtaaaggttggaagcacaaaagctgtgagccggtttcactctccttttgttgtagaaaattacagacatctgaatcaactccgggagcagctagtccttgactgcagtgctgaatggcttgattttctagagaaattcagtgaacattatcactacttgtgtaaagcagtgcatcacctagcaactgttgactgcattttctccctggccaaggtcgctaagcaaggaaattactgcagaccaactgtacaagaagaaagaaaaatcataataaaaaatggaaggcatcctgtgattgatgtgttgctgggagaacaggatcaatatgttcccaatagtacagatttatcagaggactcagagagagtaatgataattactggaccaaacatgggtggaaagagctcctacataaaacaagttgcattgattaccatcatggctcagattggctcctatgttcctgcagaagaagcgacaattgggattgtggatggcattttcacaaggatgggtgctgcagacaatatatataaaggacggagtacatttatggaagaactgactgacacagcagaaataatcagaaaagcaacatcacagtccttggttatcttggatgaattgggaagagggacgagcacccatgatggaattgccattgcctatgctacacttgagtatttcatcagagatgtgaaatccttaaccctgtttgtcacccattatccgccagtttgtgagctagaaaaaaattactcacaccaggtggggaattaccacatgggattcttggtcagcgaggatgaaagcaaactggatccaggcgaagaacaagtccctgattttgtcaccttcctttaccaaataactagaggaattgcagcaaggagttatggattaaatgtggctaaactagcagatattcctggagaaattttgaagaaagcagctcacaagtcaaaagagctggaaggattaataaatacgaaaaggaagagactcaagtattttgcaaagttatggacgatgcataatgcacaagacctgcagaagtggacagaggagttcgaaatggaagaaacacagacttctcttcctcattaaaataaagacttacatttgtgaacaaaaaatggagaattaaaaataccaactgtacaaaataactctccagtaacagcctatgtttgtgtgacatgtgagcataaaattatgaccatggtatattcctactggaaacagagaggtttttctgaagacagtctttttcaggttcctgtcttcctaacttttctaagtataaacactcttgaatagacttccactttgtaattagaaaatttcatggacagtaagtccagtaaagccttaagtggcagaatataattcccaagcttttggagggtgatataaaaatttacttcatatttttatttgtttcagttcagataattggcagctgggtgaatctggcaggaatctctccatttgaactaaaataattttattaggcagccagtttatccaccaagaacataagaattttttataagaaatagaaagaattggccaggcatggtagctcacgcctgtaatcccagcactttgggaggccaaggcgggcagatcacctgaggtcatgagttcaagaccagcctggccaacatggcaaaaccccatctctactaaaaatataaagtacatctctactaaaaatacaaaaacattagtcgggcatggtggcgcacgcctgtagccccagctactcgggaggctgaggcaggagaatctcttgaacctgggaggtggagattgcagtaagctgagatcacgtgactgcattccagcctgggcaatatagtgagattccatctcaaaaaaaaaaaaaagaaagaggaaagaaatagaattatcaagcttttaaaaactagggcatagaaagaataaggtcatgaaatttaaaatattaaatattgtcacaggattaagcagtttaaagacttggatgaaattatttgtcatttgtttgagtaataaatatttaatgaatacttgctatagatgatggtatgtcccattgaattttggtgttttcaagtgtttggaaattgtcatttttttaggtgtaattatgaaattaaggttactgctttgatcagcgcaatacacagaagtgaacttattcatttgggaccttgctattcatcaacataccaagtgtatgatcttcccagtaatgagccttacagcttagttgattcataacagtgctcccttcctgcaaatttagggtaacacgtgctcaactgtgtccctgggttttttacagcacttacaatctggcttcccagatccatgtgttctttttgtttctaaatatatgatcttgcacaaaagctctccatcctattttcctctcttttattatttctgctcagttaaatgtcttccccacatttgatggacatatttttcattccttcttctgcattattaccttcagtgatcccagcaatgaccccagacacaggagtcaatacagtgtccccaggttgtggcttcacttttgagtcagtcactcttcagctatcagactcccaaccttattggagttagagtatgatgtagtttgattctaccacccgtccagagatactaatgtatagtcaaattctcaaaactgtcaaaatagagttagttggaatgtatgctttaacttttaaaaagaacaaaattgtttcaatactctatataactgtaaatgtcttatattctttctaacaagatttcaaagatagtgctgtaacctcacctcacagggagaaaaggagatgactccaggaatgtgatgcccatgccagagggagctgcagggaccagcaatcactggtaatgtccaggtggacatctggagccacctctccctcttgcttggtccaggccagcatcaacactgaagcaggtaggggttccaggagcattgtgtcctggcagtggcagcacacagtgtctggcagctgacagtgtagaactttacagggtagattctccagcatgagcaggacgccagccaggccgccagcttgcggaagcgcaggcctcctctaagctggggaagagatcagcaccgctgaacagcatttctaagtgaggctcatccccagctgggttactgagatattggaggaaatgttgaggccaaatcccagtcataaagactgcataaatgccatggggaggtaggcagaaagttgcaaacaattgtgtttgtatttcagataaccatcttggggctgcaattctaaggttagatataaccacacaggtgagaatagggctgctggtgcatggcaagggcccttcagattccctctggtactgcataggcatgagcatacttcagatggagactgggggagacagggctgactggtggccaaatgtcaaggaaagcaacttttgaatatgatgtattcctttaaatgacttgtctgtttttagccatcaaattacaaattaagagctagtgattctgcaataacacacaccaattcctcgaaaaccttctaaagtcagaccagtttaataattccaaccttaggggaaaaaaagccaaacacattttaacaagtttcaactttgacctttctattgcttcatctctcctcagtgctgtctattctatgtagtttttaaaatattcttattatataactagtataacaatatttgaaaat

SEQ ID NO: 6 - DNA, 20 bp, Artificial sequence
  Synthetic oligonucleotide
agacatggcagggcaaggat

SEQ ID NO: 7 - DNA, 20 bp, Artificial sequence
  Synthetic oligonucleotide
tcaaaaccgcttgcctcgca

SEQ ID NO: 8 - DNA, 20 bp, Artificial sequence
  Synthetic oligonucleotide
ggaagaatcggctcaaaacc

SEQ ID NO: 9 - DNA, 20 bp, Artificial sequence
  Synthetic oligonucleotide
tggaagaatcggctcaaaac

SEQ ID NO: 10 - DNA, 20 bp, Artificial sequence
  Synthetic oligonucleotide
ctggaagaatcggctcaaaa

SEQ ID NO: 11 - DNA, 20 bp, Artificial sequence
  Synthetic oligonucleotide
actggaagaatcggctcaaa

SEQ ID NO: 12 - DNA, 20 bp, Artificial sequence
  Synthetic oligonucleotide
gactggaagaatcggctcaa

SEQ ID NO: 13 - DNA, 20 bp, Artificial sequence
  Synthetic oligonucleotide
agactggaagaatcggctca

SEQ ID NO: 14 - DNA, 20 bp, Artificial sequence
  Synthetic oligonucleotide
tagactggaagaatcggctc

SEQ ID NO: 15 - DNA, 20 bp, Artificial sequence
  Synthetic oligonucleotide
gtagactggaagaatcggct

SEQ ID NO: 16 - DNA, 20 bp, Artificial sequence
  Synthetic oligonucleotide
cgtagactggaagaatcggc

SEQ ID NO: 17 - DNA, 20 bp, Artificial sequence
  Synthetic oligonucleotide
ccgtagactggaagaatcgg

SEQ ID NO: 18 - DNA, 20 bp, Artificial sequence
  Synthetic oligonucleotide
cccgtagactggaagaatcg

SEQ ID NO: 19 - DNA, 20 bp, Artificial sequence
  Synthetic oligonucleotide
tcccgtagactggaagaatc

SEQ ID NO: 20 - DNA, 20 bp, Artificial sequence
  Synthetic oligonucleotide
ttcccgtagactggaagaat

SEQ ID NO: 21 - DNA, 20 bp, Artificial sequence
  Synthetic oligonucleotide
aggcttcccgtagactggaa

SEQ ID NO: 22 - DNA, 20 bp, Artificial sequence
  Synthetic oligonucleotide
tttcaggcttcccgtagact

SEQ ID NO: 23 - DNA, 20 bp, Artificial sequence
  Synthetic oligonucleotide
atttcaggcttcccgtagac

SEQ ID NO: 24 - DNA, 20 bp, Artificial sequence
  Synthetic oligonucleotide
gatttcaggcttcccgtaga

SEQ ID NO: 25 - DNA, 20 bp, Artificial sequence
  Synthetic oligonucleotide
ggatttcaggcttcccgtag

SEQ ID NO: 26 - DNA, 20 bp, Artificial sequence
  Synthetic oligonucleotide
tggatttcaggcttcccgta

SEQ ID NO: 27 - DNA, 20 bp, Artificial sequence
  Synthetic oligonucleotide
gtggatttcaggcttcccgt

SEQ ID NO: 28 - DNA, 20 bp, Artificial sequence
  Synthetic oligonucleotide
aggtggatttcaggcttccc

SEQ ID NO: 29 - DNA, 20 bp, Artificial sequence
  Synthetic oligonucleotide
gaggtggatttcaggcttcc

SEQ ID NO: 30 - DNA, 20 bp, Artificial sequence
  Synthetic oligonucleotide
ggaggtggatttcaggcttc

SEQ ID NO: 31 - DNA, 20 bp, Artificial sequence
  Synthetic oligonucleotide
aggaggtggatttcaggctt

SEQ ID NO: 32 - DNA, 20 bp, Artificial sequence
  Synthetic oligonucleotide
gaggaggtggatttcaggct

SEQ ID NO: 33 - DNA, 20 bp, Artificial sequence
  Synthetic oligonucleotide
aggaggaggtggatttcagg

SEQ ID NO: 34 - DNA, 20 bp, Artificial sequence
  Synthetic oligonucleotide
gaggaggaggtggatttcag

SEQ ID NO: 35 - DNA, 20 bp, Artificial sequence
  Synthetic oligonucleotide
ggaggaggaggtggatttca

SEQ ID NO: 36 - DNA, 20 bp, Artificial sequence
  Synthetic oligonucleotide
tggaggaggaggtggatttc

SEQ ID NO: 37 - DNA, 20 bp, Artificial sequence
  Synthetic oligonucleotide
gtggaggaggaggtggattt

SEQ ID NO: 38 - DNA, 20 bp, Artificial sequence
  Synthetic oligonucleotide
tgtggaggaggaggtggatt

SEQ ID NO: 39 - DNA, 20 bp, Artificial sequence
  Synthetic oligonucleotide
tcaatttctgtagctatgtg

SEQ ID NO: 40 - DNA, 20 bp, Artificial sequence
  Synthetic oligonucleotide
gtcaatttctgtagctatgt

SEQ ID NO: 41 - DNA, 20 bp, Artificial sequence
  Synthetic oligonucleotide
tgtcaatttctgtagctatg

SEQ ID NO: 42 - DNA, 20 bp, Artificial sequence
  Synthetic oligonucleotide
ctgtcaatttctgtagctat

SEQ ID NO: 43 - DNA, 20 bp, Artificial sequence
  Synthetic oligonucleotide
tctgtcaatttctgtagcta

SEQ ID NO: 44 - DNA, 20 bp, Artificial sequence
  Synthetic oligonucleotide
ttctgtcaatttctgtagct

SEQ ID NO: 45 - DNA, 20 bp, Artificial sequence
  Synthetic oligonucleotide
cttctgtcaatttctgtagc

SEQ ID NO: 46 - DNA, 20 bp, Artificial sequence
  Synthetic oligonucleotide
tcttctgtcaatttctgtag

SEQ ID NO: 47 - DNA, 20 bp, Artificial sequence
  Synthetic oligonucleotide
ttcttctgtcaatttctgta

SEQ ID NO: 48 - DNA, 20 bp, Artificial sequence
  Synthetic oligonucleotide
tttcttctgtcaatttctgt

SEQ ID NO: 49 - DNA, 20 bp, Artificial sequence
  Synthetic oligonucleotide
ctttcttctgtcaatttctg

SEQ ID NO: 50 - DNA, 20 bp, Artificial sequence
  Synthetic oligonucleotide
tctttcttctgtcaatttct

SEQ ID NO: 51 - DNA, 20 bp, Artificial sequence
  Synthetic oligonucleotide
ttctttcttctgtcaatttc

SEQ ID NO: 52 - DNA, 20 bp, Artificial sequence
  Synthetic oligonucleotide
cttctttcttctgtcaattt

SEQ ID NO: 53 - DNA, 20 bp, Artificial sequence
  Synthetic oligonucleotide
tcttctttcttctgtcaatt

SEQ ID NO: 54 - DNA, 20 bp, Artificial sequence
  Synthetic oligonucleotide
ctcttctttcttctgtcaat

SEQ ID NO: 55 - DNA, 20 bp, Artificial sequence
  Synthetic oligonucleotide
tctcttctttcttctgtcaa

SEQ ID NO: 56 - DNA, 20 bp, Artificial sequence
  Synthetic oligonucleotide
gtctcttctttcttctgtca

SEQ ID NO: 57 - DNA, 20 bp, Artificial sequence
  Synthetic oligonucleotide
ggtctcttctttcttctgtc

SEQ ID NO: 58 - DNA, 20 bp, Artificial sequence
  Synthetic oligonucleotide
tggtctcttctttcttctgt

SEQ ID NO: 59 - DNA, 20 bp, Artificial sequence
  Synthetic oligonucleotide
atggtctcttctttcttctg

SEQ ID NO: 60 - DNA, 20 bp, Artificial sequence
  Synthetic oligonucleotide
aatggtctcttctttcttct

SEQ ID NO: 61 - DNA, 20 bp, Artificial sequence
  Synthetic oligonucleotide
caatggtctcttctttcttc

SEQ ID NO: 62 - DNA, 20 bp, Artificial sequence
  Synthetic oligonucleotide
ccaatggtctcttctttctt

SEQ ID NO: 63 - DNA, 20 bp, Artificial sequence
  Synthetic oligonucleotide
tccaatggtctcttctttct

SEQ ID NO: 64 - DNA, 20 bp, Artificial sequence
  Synthetic oligonucleotide
ttccaatggtctcttctttc

SEQ ID NO: 65 - DNA, 20 bp, Artificial sequence
  Synthetic oligonucleotide
tttccaatggtctcttcttt

SEQ ID NO: 66 - DNA, 20 bp, Artificial sequence
  Synthetic oligonucleotide
ttttccaatggtctcttctt

SEQ ID NO: 67 - DNA, 20 bp, Artificial sequence
  Synthetic oligonucleotide
attttccaatggtctcttct

SEQ ID NO: 68 - DNA, 20 bp, Artificial sequence
  Synthetic oligonucleotide
cattttccaatggtctcttc

SEQ ID NO: 69 - DNA, 20 bp, Artificial sequence
  Synthetic oligonucleotide
caggcccatcattttccaat

SEQ ID NO: 70 - DNA, 20 bp, Artificial sequence
  Synthetic oligonucleotide
acaggcccatcattttccaa

SEQ ID NO: 71 - DNA, 20 bp, Artificial sequence
  Synthetic oligonucleotide
aacaggcccatcattttcca

SEQ ID NO: 72 - DNA, 20 bp, Artificial sequence
  Synthetic oligonucleotide
taacaggcccatcattttcc

SEQ ID NO: 73 - DNA, 20 bp, Artificial sequence
  Synthetic oligonucleotide
ttaacaggcccatcattttc

SEQ ID NO: 74 - DNA, 20 bp, Artificial sequence
  Synthetic oligonucleotide
tttaacaggcccatcatttt

SEQ ID NO: 75 - DNA, 20 bp, Artificial sequence
  Synthetic oligonucleotide
ttttaacaggcccatcattt

SEQ ID NO: 76 - DNA, 20 bp, Artificial sequence
  Synthetic oligonucleotide
tttttaacaggcccatcatt

SEQ ID NO: 77 - DNA, 20 bp, Artificial sequence
  Synthetic oligonucleotide
ctttttaacaggcccatcat

SEQ ID NO: 78 - DNA, 20 bp, Artificial sequence
  Synthetic oligonucleotide
tctttttaacaggcccatca

SEQ ID NO: 79 - DNA, 20 bp, Artificial sequence
  Synthetic oligonucleotide
ttctttttaacaggcccatc

SEQ ID NO: 80 - DNA, 20 bp, Artificial sequence
  Synthetic oligonucleotide
tttctttttaacaggcccat

SEQ ID NO: 81 - DNA, 20 bp, Artificial sequence
  Synthetic oligonucleotide
ctttctttttaacaggccca

SEQ ID NO: 82 - DNA, 20 bp, Artificial sequence
  Synthetic oligonucleotide
actttctttttaacaggccc

SEQ ID NO: 83 - DNA, 20 bp, Artificial sequence
  Synthetic oligonucleotide
tactttctttttaacaggcc

SEQ ID NO: 84 - DNA, 20 bp, Artificial sequence
  Synthetic oligonucleotide
ttactttctttttaacaggc

SEQ ID NO: 85 - DNA, 20 bp, Artificial sequence
  Synthetic oligonucleotide
tttactttctttttaacagg

SEQ ID NO: 86 - DNA, 20 bp, Artificial sequence
  Synthetic oligonucleotide
ctttactttctttttaacag

SEQ ID NO: 87 - DNA, 20 bp, Artificial sequence
  Synthetic oligonucleotide
gactttctttactttctttt

SEQ ID NO: 88 - DNA, 20 bp, Artificial sequence
  Synthetic oligonucleotide
ggactttctttactttcttt

SEQ ID NO: 89 - DNA, 20 bp, Artificial sequence
  Synthetic oligonucleotide
tggactttctttactttctt

SEQ ID NO: 90 - DNA, 20 bp, Artificial sequence
  Synthetic oligonucleotide
ttggactttctttactttct

SEQ ID NO: 91 - DNA, 20 bp, Artificial sequence
  Synthetic oligonucleotide
gttggactttctttactttc

SEQ ID NO: 92 - DNA, 20 bp, Artificial sequence
  Synthetic oligonucleotide
tgttggactttctttacttt

SEQ ID NO: 93 - DNA, 20 bp, Artificial sequence
  Synthetic oligonucleotide
ttgttggactttctttactt

SEQ ID NO: 94 - DNA, 20 bp, Artificial sequence
  Synthetic oligonucleotide
tttgttggactttctttact

SEQ ID NO: 95 - DNA, 20 bp, Artificial sequence
  Synthetic oligonucleotide
ttttgttggactttctttac

SEQ ID NO: 96 - DNA, 20 bp, Artificial sequence
  Synthetic oligonucleotide
cttttgttggactttcttta

SEQ ID NO: 97 - DNA, 20 bp, Artificial sequence
  Synthetic oligonucleotide
ccttttgttggactttcttt

SEQ ID NO: 98 - DNA, 20 bp, Artificial sequence
  Synthetic oligonucleotide
tccttttgttggactttctt

SEQ ID NO: 99 - DNA, 20 bp, Artificial sequence
  Synthetic oligonucleotide
ttccttttgttggactttct

SEQ ID NO: 100 - DNA, 20 bp, Artificial sequence
  Synthetic oligonucleotide
cttccttttgttggactttc

SEQ ID NO: 101 - DNA, 20 bp, Artificial sequence
  Synthetic oligonucleotide
ccttccttttgttggacttt

SEQ ID NO: 102 - DNA, 20 bp, Artificial sequence
  Synthetic oligonucleotide
tccttccttttgttggactt

SEQ ID NO: 103 - DNA, 20 bp, Artificial sequence
  Synthetic oligonucleotide
ctccttccttttgttggact

SEQ ID NO: 104 - DNA, 20 bp, Artificial sequence
  Synthetic oligonucleotide
cctccttccttttgttggac

SEQ ID NO: 105 - DNA, 20 bp, Artificial sequence
  Synthetic oligonucleotide
tcctccttccttttgttgga

SEQ ID NO: 106 - DNA, 20 bp, Artificial sequence
  Synthetic oligonucleotide
ttcctccttccttttgttgg

SEQ ID NO: 107 - DNA, 20 bp, Artificial sequence
  Synthetic oligonucleotide
cttcctccttccttttgttg

SEQ ID NO: 108 - DNA, 20 bp, Artificial sequence
  Synthetic oligonucleotide
acttcctccttccttttgtt

SEQ ID NO: 109 - DNA, 20 bp, Artificial sequence
  Synthetic oligonucleotide
cacttcctccttccttttgt

SEQ ID NO: 110 - DNA, 20 bp, Artificial sequence
  Synthetic oligonucleotide
tcacttcctccttccttttg

SEQ ID NO: 111 - DNA, 20 bp, Artificial sequence
  Synthetic oligonucleotide
atcacttcctccttcctttt

SEQ ID NO: 112 - DNA, 20 bp, Artificial sequence
  Synthetic oligonucleotide
gatcacttcctccttccttt

SEQ ID NO: 113 - DNA, 20 bp, Artificial sequence
  Synthetic oligonucleotide
agatcacttcctccttcctt

SEQ ID NO: 114 - DNA, 20 bp, Artificial sequence
  Synthetic oligonucleotide
cagatcacttcctccttcct

SEQ ID NO: 115 - DNA, 20 bp, Artificial sequence
  Synthetic oligonucleotide
ccagatcacttcctccttcc

SEQ ID NO: 116 - DNA, 20 bp, Artificial sequence
  Synthetic oligonucleotide
cccagatcacttcctccttc

SEQ ID NO: 117 - DNA, 20 bp, Artificial sequence
  Synthetic oligonucleotide
tcccagatcacttcctcctt

SEQ ID NO: 118 - DNA, 20 bp, Artificial sequence
  Synthetic oligonucleotide
ttcccagatcacttcctcct

SEQ ID NO: 119 - DNA, 20 bp, Artificial sequence
  Synthetic oligonucleotide
attcccagatcacttcctcc

SEQ ID NO: 120 - DNA, 20 bp, Artificial sequence
  Synthetic oligonucleotide
cattcccagatcacttcctc

SEQ ID NO: 121 - DNA, 20 bp, Artificial sequence
  Synthetic oligonucleotide
acattcccagatcacttcct

SEQ ID NO: 122 - DNA, 20 bp, Artificial sequence
  Synthetic oligonucleotide
gacattcccagatcacttcc

SEQ ID NO: 123 - DNA, 20 bp, Artificial sequence
  Synthetic oligonucleotide
agacattcccagatcacttc

SEQ ID NO: 124 - DNA, 20 bp, Artificial sequence
  Synthetic oligonucleotide
cagacattcccagatcactt

SEQ ID NO: 125 - DNA, 20 bp, Artificial sequence
  Synthetic oligonucleotide
ccagacattcccagatcact

SEQ ID NO: 126 - DNA, 20 bp, Artificial sequence
  Synthetic oligonucleotide
gccagacattcccagatcac

SEQ ID NO: 127 - DNA, 20 bp, Artificial sequence
  Synthetic oligonucleotide
tgccagacattcccagatca

SEQ ID NO: 128 - DNA, 20 bp, Artificial sequence
  Synthetic oligonucleotide
ttgccagacattcccagatc

SEQ ID NO: 129 - DNA, 20 bp, Artificial sequence
  Synthetic oligonucleotide
gttgccagacattcccagat

SEQ ID NO: 130 - DNA, 20 bp, Artificial sequence
  Synthetic oligonucleotide
agttgccagacattcccaga

SEQ ID NO: 131 - DNA, 20 bp, Artificial sequence
  Synthetic oligonucleotide
gagttgccagacattcccag

SEQ ID NO: 132 - DNA, 20 bp, Artificial sequence
  Synthetic oligonucleotide
agagttgccagacattccca

SEQ ID NO: 133 - DNA, 20 bp, Artificial sequence
  Synthetic oligonucleotide
cagagttgccagacattccc

SEQ ID NO: 134 - DNA, 20 bp, Artificial sequence
  Synthetic oligonucleotide
tcagagttgccagacattcc

SEQ ID NO: 135 - DNA, 20 bp, Artificial sequence
  Synthetic oligonucleotide
ctcagagttgccagacattc

SEQ ID NO: 136 - DNA, 20 bp, Artificial sequence
  Synthetic oligonucleotide
gctcagagttgccagacatt

SEQ ID NO: 137 - DNA, 20 bp, Artificial sequence
  Synthetic oligonucleotide
tttctttggctcagagttgc

SEQ ID NO: 138 - DNA, 20 bp, Artificial sequence
  Synthetic oligonucleotide
atttctttggctcagagttg

SEQ ID NO: 139 - DNA, 20 bp, Artificial sequence
  Synthetic oligonucleotide
catttctttggctcagagtt

SEQ ID NO: 140 - DNA, 20 bp, Artificial sequence
  Synthetic oligonucleotide
acatttctttggctcagagt

SEQ ID NO: 141 - DNA, 20 bp, Artificial sequence
  Synthetic oligonucleotide
gacatttctttggctcagag

SEQ ID NO: 142 - DNA, 20 bp, Artificial sequence
  Synthetic oligonucleotide
agacatttctttggctcaga

SEQ ID NO: 143 - DNA, 20 bp, Artificial sequence
  Synthetic oligonucleotide
cagacatttctttggctcag

SEQ ID NO: 144 - DNA, 20 bp, Artificial sequence
  Synthetic oligonucleotide
tcagacatttctttggctca

SEQ ID NO: 145 - DNA, 20 bp, Artificial sequence
  Synthetic oligonucleotide
ctcagacatttctttggctc

SEQ ID NO: 146 - DNA, 20 bp, Artificial sequence
  Synthetic oligonucleotide
cctcagacatttctttggct

SEQ ID NO: 147 - DNA, 20 bp, Artificial sequence
  Synthetic oligonucleotide
tcctcagacatttctttggc

SEQ ID NO: 148 - DNA, 20 bp, Artificial sequence
  Synthetic oligonucleotide
tgaaacattcctggtcctca

SEQ ID NO: 149 - DNA, 20 bp, Artificial sequence
  Synthetic oligonucleotide
ttgaaacattcctggtcctc

SEQ ID NO: 150 - DNA, 20 bp, Artificial sequence
  Synthetic oligonucleotide
tttgaaacattcctggtcct

SEQ ID NO: 151 - DNA, 20 bp, Artificial sequence
  Synthetic oligonucleotide
ctttgaaacattcctggtcc

SEQ ID NO: 152 - DNA, 20 bp, Artificial sequence
  Synthetic oligonucleotide
actttgaaacattcctggtc

SEQ ID NO: 153 - DNA, 20 bp, Artificial sequence
  Synthetic oligonucleotide
gactttgaaacattcctggt

SEQ ID NO: 154 - DNA, 20 bp, Artificial sequence
  Synthetic oligonucleotide
agactttgaaacattcctgg

SEQ ID NO: 155 - DNA, 20 bp, Artificial sequence
  Synthetic oligonucleotide
gagactttgaaacattcctg

SEQ ID NO: 156 - DNA, 20 bp, Artificial sequence
  Synthetic oligonucleotide
agagactttgaaacattcct

SEQ ID NO: 157 - DNA, 20 bp, Artificial sequence
  Synthetic oligonucleotide
cagagactttgaaacattcc

SEQ ID NO: 158 - DNA, 20 bp, Artificial sequence
  Synthetic oligonucleotide
ccagagactttgaaacattc

SEQ ID NO: 159 - DNA, 20 bp, Artificial sequence
  Synthetic oligonucleotide
tccagagactttgaaacatt

SEQ ID NO: 160 - DNA, 20 bp, Artificial sequence
  Synthetic oligonucleotide
ttccagagactttgaaacat

SEQ ID NO: 161 - DNA, 20 bp, Artificial sequence
  Synthetic oligonucleotide
tttccagagactttgaaaca

SEQ ID NO: 162 - DNA, 20 bp, Artificial sequence
  Synthetic oligonucleotide
ttttccagagactttgaaac

SEQ ID NO: 163 - DNA, 20 bp, Artificial sequence
  Synthetic oligonucleotide
tttttccagagactttgaaa

SEQ ID NO: 164 - DNA, 20 bp, Artificial sequence
  Synthetic oligonucleotide
atttttccagagactttgaa

SEQ ID NO: 165 - DNA, 20 bp, Artificial sequence
  Synthetic oligonucleotide
aatttttccagagactttga

SEQ ID NO: 166 - DNA, 20 bp, Artificial sequence
  Synthetic oligonucleotide
caatttttccagagactttg

SEQ ID NO: 167 - DNA, 20 bp, Artificial sequence
  Synthetic oligonucleotide
tcaatttttccagagacttt

SEQ ID NO: 168 - DNA, 20 bp, Artificial sequence
  Synthetic oligonucleotide
ttcaatttttccagagactt

SEQ ID NO: 169 - DNA, 20 bp, Artificial sequence
  Synthetic oligonucleotide
tttcaatttttccagagact

SEQ ID NO: 170 - DNA, 20 bp, Artificial sequence
  Synthetic oligonucleotide
ctttcaatttttccagagac

SEQ ID NO: 171 - DNA, 20 bp, Artificial sequence
  Synthetic oligonucleotide
tctttcaatttttccagaga

SEQ ID NO: 172 - DNA, 20 bp, Artificial sequence
  Synthetic oligonucleotide
ttctttcaatttttccagag

SEQ ID NO: 173 - DNA, 20 bp, Artificial sequence
  Synthetic oligonucleotide
attctttcaatttttccaga

SEQ ID NO: 174 - DNA, 20 bp, Artificial sequence
  Synthetic oligonucleotide
aattctttcaatttttccag

SEQ ID NO: 175 - DNA, 20 bp, Artificial sequence
  Synthetic oligonucleotide
gaattctttcaatttttcca

SEQ ID NO: 176 - DNA, 20 bp, Artificial sequence
  Synthetic oligonucleotide
agaattctttcaatttttcc

SEQ ID NO: 177 - DNA, 20 bp, Artificial sequence
  Synthetic oligonucleotide
cagaattctttcaatttttc

SEQ ID NO: 178 - DNA, 20 bp, Artificial sequence
  Synthetic oligonucleotide
gcagaattctttcaattttt

SEQ ID NO: 179 - DNA, 20 bp, Artificial sequence
  Synthetic oligonucleotide
agcagaattctttcaatttt

SEQ ID NO: 180 - DNA, 20 bp, Artificial sequence
  Synthetic oligonucleotide
cagcagaattctttcaattt

SEQ ID NO: 181 - DNA, 20 bp, Artificial sequence
  Synthetic oligonucleotide
gcagcagaattctttcaatt

SEQ ID NO: 182 - DNA, 20 bp, Artificial sequence
  Synthetic oligonucleotide
cgcagcagaattctttcaat

SEQ ID NO: 183 - DNA, 20 bp, Artificial sequence
  Synthetic oligonucleotide
tcgcagcagaattctttcaa

SEQ ID NO: 184 - DNA, 20 bp, Artificial sequence
  Synthetic oligonucleotide
atcgcagcagaattctttca

SEQ ID NO: 185 - DNA, 20 bp, Artificial sequence
  Synthetic oligonucleotide
aatcgcagcagaattctttc

SEQ ID NO: 186 - DNA, 20 bp, Artificial sequence
  Synthetic oligonucleotide
gaatcgcagcagaattcttt

SEQ ID NO: 187 - DNA, 20 bp, Artificial sequence
  Synthetic oligonucleotide
agaatcgcagcagaattctt

SEQ ID NO: 188 - DNA, 20 bp, Artificial sequence
  Synthetic oligonucleotide
cagaatcgcagcagaattct

SEQ ID NO: 189 - DNA, 20 bp, Artificial sequence
  Synthetic oligonucleotide
gcagaatcgcagcagaattc

SEQ ID NO: 190 - DNA, 20 bp, Artificial sequence
  Synthetic oligonucleotide
ggcagaatcgcagcagaatt

SEQ ID NO: 191 - DNA, 20 bp, Artificial sequence
  Synthetic oligonucleotide
gggcagaatcgcagcagaat

SEQ ID NO: 192 - DNA, 20 bp, Artificial sequence
  Synthetic oligonucleotide
agggcagaatcgcagcagaa

SEQ ID NO: 193 - DNA, 20 bp, Artificial sequence
  Synthetic oligonucleotide
aagggcagaatcgcagcaga

SEQ ID NO: 194 - DNA, 20 bp, Artificial sequence
  Synthetic oligonucleotide
tgaggaagggcagaatcgca

SEQ ID NO: 195 - DNA, 20 bp, Artificial sequence
  Synthetic oligonucleotide
ttgaggaagggcagaatcgc

SEQ ID NO: 196 - DNA, 20 bp, Artificial sequence
  Synthetic oligonucleotide
tttgaggaagggcagaatcg

SEQ ID NO: 197 - DNA, 20 bp, Artificial sequence
  Synthetic oligonucleotide
ctttgaggaagggcagaatc

SEQ ID NO: 198 - DNA, 20 bp, Artificial sequence
  Synthetic oligonucleotide
ctgtctggactctactttga

SEQ ID NO: 199 - DNA, 20 bp, Artificial sequence
  Synthetic oligonucleotide
tctgtctggactctactttg

SEQ ID NO: 200 - DNA, 20 bp, Artificial sequence
  Synthetic oligonucleotide
ttctgtctggactctacttt

SEQ ID NO: 201 - DNA, 20 bp, Artificial sequence
  Synthetic oligonucleotide
attctgtctggactctactt

SEQ ID NO: 202 - DNA, 20 bp, Artificial sequence
  Synthetic oligonucleotide
gattctgtctggactctact

SEQ ID NO: 203 - DNA, 20 bp, Artificial sequence
  Synthetic oligonucleotide
agattctgtctggactctac

SEQ ID NO: 204 - DNA, 20 bp, Artificial sequence
  Synthetic oligonucleotide
gagattctgtctggactcta

SEQ ID NO: 205 - DNA, 20 bp, Artificial sequence
  Synthetic oligonucleotide
agagattctgtctggactct

SEQ ID NO: 206 - DNA, 20 bp, Artificial sequence
  Synthetic oligonucleotide
cagagattctgtctggactc

SEQ ID NO: 207 - DNA, 20 bp, Artificial sequence
  Synthetic oligonucleotide
gaactgcaaatctctcctgc

SEQ ID NO: 208 - DNA, 20 bp, Artificial sequence
  Synthetic oligonucleotide
agaactgcaaatctctcctg

SEQ ID NO: 209 - DNA, 20 bp, Artificial sequence
  Synthetic oligonucleotide
cagaactgcaaatctctcct

SEQ ID NO: 210 - DNA, 20 bp, Artificial sequence
  Synthetic oligonucleotide
agtacattttggcagaactg

SEQ ID NO: 211 - DNA, 20 bp, Artificial sequence
  Synthetic oligonucleotide
cagtacattttggcagaact

SEQ ID NO: 212 - DNA, 20 bp, Artificial sequence
  Synthetic oligonucleotide
tcagtacattttggcagaac

SEQ ID NO: 213 - DNA, 20 bp, Artificial sequence
  Synthetic oligonucleotide
atcagtacattttggcagaa

SEQ ID NO: 214 - DNA, 20 bp, Artificial sequence
  Synthetic oligonucleotide
aatcagtacattttggcaga

SEQ ID NO: 215 - DNA, 20 bp, Artificial sequence
  Synthetic oligonucleotide
aaatcagtacattttggcag

SEQ ID NO: 216 - DNA, 20 bp, Artificial sequence
  Synthetic oligonucleotide
aaaatcagtacattttggca

SEQ ID NO: 217 - DNA, 20 bp, Artificial sequence
  Synthetic oligonucleotide
catcaaaatcagtacatttt

SEQ ID NO: 218 - DNA, 20 bp, Artificial sequence
  Synthetic oligonucleotide
tcatcaaaatcagtacattt

SEQ ID NO: 219 - DNA, 20 bp, Artificial sequence
  Synthetic oligonucleotide
atcatcaaaatcagtacatt

SEQ ID NO: 220 - DNA, 20 bp, Artificial sequence
  Synthetic oligonucleotide
tatcatcaaaatcagtacat

SEQ ID NO: 221 - DNA, 20 bp, Artificial sequence
  Synthetic oligonucleotide
atatcatcaaaatcagtaca

SEQ ID NO: 222 - DNA, 20 bp, Artificial sequence
  Synthetic oligonucleotide
gatatcatcaaaatcagtac

SEQ ID NO: 223 - DNA, 20 bp, Artificial sequence
  Synthetic oligonucleotide
tgatatcatcaaaatcagta

SEQ ID NO: 224 - DNA, 20 bp, Artificial sequence
  Synthetic oligonucleotide
tgtagaagactgatatcatc

SEQ ID NO: 225 - DNA, 20 bp, Artificial sequence
  Synthetic oligonucleotide
gtgtagaagactgatatcat

SEQ ID NO: 226 - DNA, 20 bp, Artificial sequence
  Synthetic oligonucleotide
cgtgtagaagactgatatca

SEQ ID NO: 227 - DNA, 20 bp, Artificial sequence
  Synthetic oligonucleotide
gcgtgtagaagactgatatc

SEQ ID NO: 228 - DNA, 20 bp, Artificial sequence
  Synthetic oligonucleotide
tgcgtgtagaagactgatat

SEQ ID NO: 229 - DNA, 20 bp, Artificial sequence
  Synthetic oligonucleotide
ttgcgtgtagaagactgata

SEQ ID NO: 230 - DNA, 20 bp, Artificial sequence
  Synthetic oligonucleotide
tttgcgtgtagaagactgat

SEQ ID NO: 231 - DNA, 20 bp, Artificial sequence
  Synthetic oligonucleotide
ctttgcgtgtagaagactga

SEQ ID NO: 232 - DNA, 20 bp, Artificial sequence
  Synthetic oligonucleotide
tctttgcgtgtagaagactg

SEQ ID NO: 233 - DNA, 20 bp, Artificial sequence
  Synthetic oligonucleotide
ttctttgcgtgtagaagact

SEQ ID NO: 234 - DNA, 20 bp, Artificial sequence
  Synthetic oligonucleotide
attctttgcgtgtagaagac

SEQ ID NO: 235 - DNA, 20 bp, Artificial sequence
  Synthetic oligonucleotide
cattctttgcgtgtagaaga

SEQ ID NO: 236 - DNA, 20 bp, Artificial sequence
  Synthetic oligonucleotide
cttcagaagaaactgcattc

SEQ ID NO: 237 - DNA, 20 bp, Artificial sequence
  Synthetic oligonucleotide
tcttcagaagaaactgcatt

SEQ ID NO: 238 - DNA, 20 bp, Artificial sequence
  Synthetic oligonucleotide
acgtttcgaatcttcagaag

SEQ ID NO: 239 - DNA, 20 bp, Artificial sequence
  Synthetic oligonucleotide
gacgtttcgaatcttcagaa

SEQ ID NO: 240 - DNA, 20 bp, Artificial sequence
  Synthetic oligonucleotide
tgacgtttcgaatcttcaga

SEQ ID NO: 241 - DNA, 20 bp, Artificial sequence
  Synthetic oligonucleotide
ttgacgtttcgaatcttcag

SEQ ID NO: 242 - DNA, 20 bp, Artificial sequence
  Synthetic oligonucleotide
tttgacgtttcgaatcttca

SEQ ID NO: 243 - DNA, 20 bp, Artificial sequence
  Synthetic oligonucleotide
atttgacgtttcgaatcttc

SEQ ID NO: 244 - DNA, 20 bp, Artificial sequence
  Synthetic oligonucleotide
aatttgacgtttcgaatctt

SEQ ID NO: 245 - DNA, 20 bp, Artificial sequence
  Synthetic oligonucleotide
taatttgacgtttcgaatct

SEQ ID NO: 246 - DNA, 20 bp, Artificial sequence
  Synthetic oligonucleotide
ttaatttgacgtttcgaatc

SEQ ID NO: 247 - DNA, 20 bp, Artificial sequence
  Synthetic oligonucleotide
attaatttgacgtttcgaat

SEQ ID NO: 248 - DNA, 20 bp, Artificial sequence
  Synthetic oligonucleotide
gattaatttgacgtttcgaa

SEQ ID NO: 249 - DNA, 20 bp, Artificial sequence
  Synthetic oligonucleotide
tgattaatttgacgtttcga

SEQ ID NO: 250 - DNA, 20 bp, Artificial sequence
  Synthetic oligonucleotide
ttgattaatttgacgtttcg

SEQ ID NO: 251 - DNA, 20 bp, Artificial sequence
  Synthetic oligonucleotide
tttgattaatttgacgtttc

SEQ ID NO: 252 - DNA, 20 bp, Artificial sequence
  Synthetic oligonucleotide
cttttgattaatttgacgtt

SEQ ID NO: 253 - DNA, 20 bp, Artificial sequence
  Synthetic oligonucleotide
ccttttgattaatttgacgt

SEQ ID NO: 254 - DNA, 20 bp, Artificial sequence
  Synthetic oligonucleotide
tccttttgattaatttgacg

SEQ ID NO: 255 - DNA, 20 bp, Artificial sequence
  Synthetic oligonucleotide
gtccttttgattaatttgac

SEQ ID NO: 256 - DNA, 20 bp, Artificial sequence
  Synthetic oligonucleotide
tgtccttttgattaatttga

SEQ ID NO: 257 - DNA, 20 bp, Artificial sequence
  Synthetic oligonucleotide
gtgtccttttgattaatttg

SEQ ID NO: 258 - DNA, 20 bp, Artificial sequence
  Synthetic oligonucleotide
tgtgtccttttgattaattt

SEQ ID NO: 259 - DNA, 20 bp, Artificial sequence
  Synthetic oligonucleotide
ttgtgtccttttgattaatt

SEQ ID NO: 260 - DNA, 20 bp, Artificial sequence
  Synthetic oligonucleotide
gttgtgtccttttgattaat

SEQ ID NO: 261 - DNA, 20 bp, Artificial sequence
  Synthetic oligonucleotide
tgttgtgtccttttgattaa

SEQ ID NO: 262 - DNA, 20 bp, Artificial sequence
  Synthetic oligonucleotide
gtgttgtgtccttttgatta

SEQ ID NO: 263 - DNA, 20 bp, Artificial sequence
  Synthetic oligonucleotide
agtgttgtgtccttttgatt

SEQ ID NO: 264 - DNA, 20 bp, Artificial sequence
  Synthetic oligonucleotide
aagtgttgtgtccttttgat

SEQ ID NO: 265 - DNA, 20 bp, Artificial sequence
  Synthetic oligonucleotide
aaagtgttgtgtccttttga

SEQ ID NO: 266 - DNA, 20 bp, Artificial sequence
  Synthetic oligonucleotide
aaaagtgttgtgtccttttg

SEQ ID NO: 267 - DNA, 20 bp, Artificial sequence
  Synthetic oligonucleotide
caaaaagtgttgtgtccttt

SEQ ID NO: 268 - DNA, 20 bp, Artificial sequence
  Synthetic oligonucleotide
tcaaaaagtgttgtgtcctt

SEQ ID NO: 269 - DNA, 20 bp, Artificial sequence
  Synthetic oligonucleotide
atcaaaaagtgttgtgtcct

SEQ ID NO: 270 - DNA, 20 bp, Artificial sequence
  Synthetic oligonucleotide
gatcaaaaagtgttgtgtcc

SEQ ID NO: 271 - DNA, 20 bp, Artificial sequence
  Synthetic oligonucleotide
agatcaaaaagtgttgtgtc

SEQ ID NO: 272 - DNA, 20 bp, Artificial sequence
  Synthetic oligonucleotide
gagatcaaaaagtgttgtgt

SEQ ID NO: 273 - DNA, 20 bp, Artificial sequence
  Synthetic oligonucleotide
tgagatcaaaaagtgttgtg

SEQ ID NO: 274 - DNA, 20 bp, Artificial sequence
  Synthetic oligonucleotide
ctgagatcaaaaagtgttgt

SEQ ID NO: 275 - DNA, 20 bp, Artificial sequence
  Synthetic oligonucleotide
actgagatcaaaaagtgttg

SEQ ID NO: 276 - DNA, 20 bp, Artificial sequence
  Synthetic oligonucleotide
gactgagatcaaaaagtgtt

SEQ ID NO: 277 - DNA, 20 bp, Artificial sequence
  Synthetic oligonucleotide
tgactgagatcaaaaagtgt

SEQ ID NO: 278 - DNA, 20 bp, Artificial sequence
  Synthetic oligonucleotide
ctgactgagatcaaaaagtg

SEQ ID NO: 279 - DNA, 20 bp, Artificial sequence
  Synthetic oligonucleotide
actgactgagatcaaaaagt

SEQ ID NO: 280 - DNA, 20 bp, Artificial sequence
  Synthetic oligonucleotide
aactgactgagatcaaaaag

SEQ ID NO: 281 - DNA, 20 bp, Artificial sequence
  Synthetic oligonucleotide
aaactgactgagatcaaaaa

SEQ ID NO: 282 - DNA, 20 bp, Artificial sequence
  Synthetic oligonucleotide
caaactgactgagatcaaaa

SEQ ID NO: 283 - DNA, 20 bp, Artificial sequence
  Synthetic oligonucleotide
ccaaactgactgagatcaaa

SEQ ID NO: 284 - DNA, 20 bp, Artificial sequence
  Synthetic oligonucleotide
tccaaactgactgagatcaa

SEQ ID NO: 285 - DNA, 20 bp, Artificial sequence
  Synthetic oligonucleotide
atccaaactgactgagatca

SEQ ID NO: 286 - DNA, 20 bp, Artificial sequence
  Synthetic oligonucleotide
gatccaaactgactgagatc

SEQ ID NO: 287 - DNA, 20 bp, Artificial sequence
  Synthetic oligonucleotide
tgatccaaactgactgagat

SEQ ID NO: 288 - DNA, 20 bp, Artificial sequence
  Synthetic oligonucleotide
atgatccaaactgactgaga

SEQ ID NO: 289 - DNA, 20 bp, Artificial sequence
  Synthetic oligonucleotide
gatgatccaaactgactgag

SEQ ID NO: 290 - DNA, 20 bp, Artificial sequence
  Synthetic oligonucleotide
tgatgatccaaactgactga

SEQ ID NO: 291 - DNA, 20 bp, Artificial sequence
  Synthetic oligonucleotide
ttgatgatccaaactgactg

SEQ ID NO: 292 - DNA, 20 bp, Artificial sequence
  Synthetic oligonucleotide
tttgatgatccaaactgact

SEQ ID NO: 293 - DNA, 20 bp, Artificial sequence
  Synthetic oligonucleotide
atttgatgatccaaactgac

SEQ ID NO: 294 - DNA, 20 bp, Artificial sequence
  Synthetic oligonucleotide
tatttgatgatccaaactga

SEQ ID NO: 295 - DNA, 20 bp, Artificial sequence
  Synthetic oligonucleotide
gtatttgatgatccaaactg

SEQ ID NO: 296 - DNA, 20 bp, Artificial sequence
  Synthetic oligonucleotide
tgtatttgatgatccaaact

SEQ ID NO: 297 - DNA, 20 bp, Artificial sequence
  Synthetic oligonucleotide
ttgtatttgatgatccaaac

SEQ ID NO: 298 - DNA, 20 bp, Artificial sequence
  Synthetic oligonucleotide
acttgtatttgatgatccaa

SEQ ID NO: 299 - DNA, 20 bp, Artificial sequence
  Synthetic oligonucleotide
gacttgtatttgatgatcca

SEQ ID NO: 300 - DNA, 20 bp, Artificial sequence
  Synthetic oligonucleotide
tgacttgtatttgatgatcc

SEQ ID NO: 301 - DNA, 20 bp, Artificial sequence
  Synthetic oligonucleotide
atgacttgtatttgatgatc

SEQ ID NO: 302 - DNA, 20 bp, Artificial sequence
  Synthetic oligonucleotide
catgacttgtatttgatgat

SEQ ID NO: 303 - DNA, 20 bp, Artificial sequence
  Synthetic oligonucleotide
tcatgacttgtatttgatga

SEQ ID NO: 304 - DNA, 20 bp, Artificial sequence
  Synthetic oligonucleotide
ttcatgacttgtatttgatg

SEQ ID NO: 305 - DNA, 20 bp, Artificial sequence
  Synthetic oligonucleotide
tttcatgacttgtatttgat

SEQ ID NO: 306 - DNA, 20 bp, Artificial sequence
  Synthetic oligonucleotide
ttttcatgacttgtatttga

SEQ ID NO: 307 - DNA, 20 bp, Artificial sequence
  Synthetic oligonucleotide
attttcatgacttgtatttg

SEQ ID NO: 308 - DNA, 20 bp, Artificial sequence
  Synthetic oligonucleotide
gtaaattttcatgacttgta

SEQ ID NO: 309 - DNA, 20 bp, Artificial sequence
  Synthetic oligonucleotide
tgtaaattttcatgacttgt

SEQ ID NO: 310 - DNA, 20 bp, Artificial sequence
  Synthetic oligonucleotide
ctgtaaattttcatgacttg

SEQ ID NO: 311 - DNA, 20 bp, Artificial sequence
  Synthetic oligonucleotide
tctgtaaattttcatgactt

SEQ ID NO: 312 - DNA, 20 bp, Artificial sequence
  Synthetic oligonucleotide
ttctgtaaattttcatgact

SEQ ID NO: 313 - DNA, 20 bp, Artificial sequence
  Synthetic oligonucleotide
tttctgtaaattttcatgac

SEQ ID NO: 314 - DNA, 20 bp, Artificial sequence
  Synthetic oligonucleotide
gttttctgtaaattttcatg

SEQ ID NO: 315 - DNA, 20 bp, Artificial sequence
  Synthetic oligonucleotide
tgatttggaagcagttttct

SEQ ID NO: 316 - DNA, 20 bp, Artificial sequence
  Synthetic oligonucleotide
tttgttagctgatttggaag

SEQ ID NO: 317 - DNA, 20 bp, Artificial sequence
  Synthetic oligonucleotide
gtttgttagctgatttggaa

SEQ ID NO: 318 - DNA, 20 bp, Artificial sequence
  Synthetic oligonucleotide
cgtttgttagctgatttgga

SEQ ID NO: 319 - DNA, 20 bp, Artificial sequence
  Synthetic oligonucleotide
ccgtttgttagctgatttgg

SEQ ID NO: 320 - DNA, 20 bp, Artificial sequence
  Synthetic oligonucleotide
accgtttgttagctgatttg

SEQ ID NO: 321 - DNA, 20 bp, Artificial sequence
  Synthetic oligonucleotide
gaccgtttgttagctgattt

SEQ ID NO: 322 - DNA, 20 bp, Artificial sequence
  Synthetic oligonucleotide
ggaccgtttgttagctgatt

SEQ ID NO: 323 - DNA, 20 bp, Artificial sequence
  Synthetic oligonucleotide
tggaccgtttgttagctgat

SEQ ID NO: 324 - DNA, 20 bp, Artificial sequence
  Synthetic oligonucleotide
ttggaccgtttgttagctga

SEQ ID NO: 325 - DNA, 20 bp, Artificial sequence
  Synthetic oligonucleotide
tttggaccgtttgttagctg

SEQ ID NO: 326 - DNA, 20 bp, Artificial sequence
  Synthetic oligonucleotide
ttttggaccgtttgttagct

SEQ ID NO: 327 - DNA, 20 bp, Artificial sequence
  Synthetic oligonucleotide
cttttggaccgtttgttagc

SEQ ID NO: 328 - DNA, 20 bp, Artificial sequence
  Synthetic oligonucleotide
gcttttggaccgtttgttag

SEQ ID NO: 329 - DNA, 20 bp, Artificial sequence
  Synthetic oligonucleotide
tgcttttggaccgtttgtta

SEQ ID NO: 330 - DNA, 20 bp, Artificial sequence
  Synthetic oligonucleotide
atgcttttggaccgtttgtt

SEQ ID NO: 331 - DNA, 20 bp, Artificial sequence
  Synthetic oligonucleotide
gatgcttttggaccgtttgt

SEQ ID NO: 332 - DNA, 20 bp, Artificial sequence
  Synthetic oligonucleotide
agatgcttttggaccgtttg

SEQ ID NO: 333 - DNA, 20 bp, Artificial sequence
  Synthetic oligonucleotide
tagatgcttttggaccgttt

SEQ ID NO: 334 - DNA, 20 bp, Artificial sequence
  Synthetic oligonucleotide
atagatgcttttggaccgtt

SEQ ID NO: 335 - DNA, 20 bp, Artificial sequence
  Synthetic oligonucleotide
tatagatgcttttggaccgt

SEQ ID NO: 336 - DNA, 20 bp, Artificial sequence
  Synthetic oligonucleotide
gtatagatgcttttggaccg

SEQ ID NO: 337 - DNA, 20 bp, Artificial sequence
  Synthetic oligonucleotide
cgtatagatgcttttggacc

SEQ ID NO: 338 - DNA, 20 bp, Artificial sequence
  Synthetic oligonucleotide
gcgtatagatgcttttggac

SEQ ID NO: 339 - DNA, 20 bp, Artificial sequence
  Synthetic oligonucleotide
ggcgtatagatgcttttgga

SEQ ID NO: 340 - DNA, 20 bp, Artificial sequence
  Synthetic oligonucleotide
cggcgtatagatgcttttgg

SEQ ID NO: 341 - DNA, 20 bp, Artificial sequence
  Synthetic oligonucleotide
gcggcgtatagatgcttttg

SEQ ID NO: 342 - DNA, 20 bp, Artificial sequence
  Synthetic oligonucleotide
agcggcgtatagatgctttt

SEQ ID NO: 343 - DNA, 20 bp, Artificial sequence
  Synthetic oligonucleotide
tagcggcgtatagatgcttt

SEQ ID NO: 344 - DNA, 20 bp, Artificial sequence
  Synthetic oligonucleotide
ctagcggcgtatagatgctt

SEQ ID NO: 345 - DNA, 20 bp, Artificial sequence
  Synthetic oligonucleotide
tctagcggcgtatagatgct

SEQ ID NO: 346 - DNA, 20 bp, Artificial sequence
  Synthetic oligonucleotide
ttctagcggcgtatagatgc

SEQ ID NO: 347 - DNA, 20 bp, Artificial sequence
  Synthetic oligonucleotide
attctagcggcgtatagatg

SEQ ID NO: 348 - DNA, 20 bp, Artificial sequence
  Synthetic oligonucleotide
aattctagcggcgtatagat

SEQ ID NO: 349 - DNA, 20 bp, Artificial sequence
  Synthetic oligonucleotide
taattctagcggcgtataga

SEQ ID NO: 350 - DNA, 20 bp, Artificial sequence
  Synthetic oligonucleotide
gtaattctagcggcgtatag

SEQ ID NO: 351 - DNA, 20 bp, Artificial sequence
  Synthetic oligonucleotide
tgtaattctagcggcgtata

SEQ ID NO: 352 - DNA, 20 bp, Artificial sequence
  Synthetic oligonucleotide
ttgtaattctagcggcgtat

SEQ ID NO: 353 - DNA, 20 bp, Artificial sequence
  Synthetic oligonucleotide
attgtaattctagcggcgta

SEQ ID NO: 354 - DNA, 20 bp, Artificial sequence
  Synthetic oligonucleotide
tattgtaattctagcggcgt

SEQ ID NO: 355 - DNA, 20 bp, Artificial sequence
  Synthetic oligonucleotide
gtattgtaattctagcggcg

SEQ ID NO: 356 - DNA, 20 bp, Artificial sequence
  Synthetic oligonucleotide
tgtattgtaattctagcggc

SEQ ID NO: 357 - DNA, 20 bp, Artificial sequence
  Synthetic oligonucleotide
atgtattgtaattctagcgg

SEQ ID NO: 358 - DNA, 20 bp, Artificial sequence
  Synthetic oligonucleotide
tatgtattgtaattctagcg

SEQ ID NO: 359 - DNA, 20 bp, Artificial sequence
  Synthetic oligonucleotide
ctatgtattgtaattctagc

SEQ ID NO: 360 - DNA, 20 bp, Artificial sequence
  Synthetic oligonucleotide
tctatgtattgtaattctag

SEQ ID NO: 361 - DNA, 20 bp, Artificial sequence
  Synthetic oligonucleotide
cttcatttctatgtattgta

SEQ ID NO: 362 - DNA, 20 bp, Artificial sequence
  Synthetic oligonucleotide
gcttcatttctatgtattgt

SEQ ID NO: 363 - DNA, 20 bp, Artificial sequence
  Synthetic oligonucleotide
tgcttcatttctatgtattg

SEQ ID NO: 364 - DNA, 20 bp, Artificial sequence
  Synthetic oligonucleotide
ctgcttcatttctatgtatt

SEQ ID NO: 365 - DNA, 20 bp, Artificial sequence
  Synthetic oligonucleotide
gctgcttcatttctatgtat

SEQ ID NO: 366 - DNA, 20 bp, Artificial sequence
  Synthetic oligonucleotide
tgctgcttcatttctatgta

SEQ ID NO: 367 - DNA, 20 bp, Artificial sequence
  Synthetic oligonucleotide
ctgctgcttcatttctatgt

SEQ ID NO: 368 - DNA, 20 bp, Artificial sequence
  Synthetic oligonucleotide
gctgctgcttcatttctatg

SEQ ID NO: 369 - DNA, 20 bp, Artificial sequence
  Synthetic oligonucleotide
acacacaaaactgcatcttt

SEQ ID NO: 370 - DNA, 20 bp, Artificial sequence
  Synthetic oligonucleotide
cacacacaaaactgcatctt

SEQ ID NO: 371 - DNA, 20 bp, Artificial sequence
  Synthetic oligonucleotide
ccacacacaaaactgcatct

SEQ ID NO: 372 - DNA, 20 bp, Artificial sequence
  Synthetic oligonucleotide
tccacacacaaaactgcatc

SEQ ID NO: 373 - DNA, 20 bp, Artificial sequence
  Synthetic oligonucleotide
ttccacacacaaaactgcat

SEQ ID NO: 374 - DNA, 20 bp, Artificial sequence
  Synthetic oligonucleotide
attccacacacaaaactgca

SEQ ID NO: 375 - DNA, 20 bp, Artificial sequence
  Synthetic oligonucleotide
cattccacacacaaaactgc

SEQ ID NO: 376 - DNA, 20 bp, Artificial sequence
  Synthetic oligonucleotide
acattccacacacaaaactg

SEQ ID NO: 377 - DNA, 20 bp, Artificial sequence
  Synthetic oligonucleotide
cacattccacacacaaaact

SEQ ID NO: 378 - DNA, 20 bp, Artificial sequence
  Synthetic oligonucleotide
ccacattccacacacaaaac

SEQ ID NO: 379 - DNA, 20 bp, Artificial sequence
  Synthetic oligonucleotide
tccacattccacacacaaaa

SEQ ID NO: 380 - DNA, 20 bp, Artificial sequence
  Synthetic oligonucleotide
atccacattccacacacaaa

SEQ ID NO: 381 - DNA, 20 bp, Artificial sequence
  Synthetic oligonucleotide
tatccacattccacacacaa

SEQ ID NO: 382 - DNA, 20 bp, Artificial sequence
  Synthetic oligonucleotide
atatccacattccacacaca

SEQ ID NO: 383 - DNA, 20 bp, Artificial sequence
  Synthetic oligonucleotide
tatatccacattccacacac

SEQ ID NO: 384 - DNA, 20 bp, Artificial sequence
  Synthetic oligonucleotide
ttatatccacattccacaca

SEQ ID NO: 385 - DNA, 20 bp, Artificial sequence
  Synthetic oligonucleotide
cttatatccacattccacac

SEQ ID NO: 386 - DNA, 20 bp, Artificial sequence
  Synthetic oligonucleotide
acttatatccacattccaca

SEQ ID NO: 387 - DNA, 20 bp, Artificial sequence
  Synthetic oligonucleotide
tacttatatccacattccac

SEQ ID NO: 388 - DNA, 20 bp, Artificial sequence
  Synthetic oligonucleotide
atacttatatccacattcca

SEQ ID NO: 389 - DNA, 20 bp, Artificial sequence
  Synthetic oligonucleotide
tatacttatatccacattcc

SEQ ID NO: 390 - DNA, 20 bp, Artificial sequence
  Synthetic oligonucleotide
ctatacttatatccacattc

SEQ ID NO: 391 - DNA, 20 bp, Artificial sequence
  Synthetic oligonucleotide
tctatacttatatccacatt

SEQ ID NO: 392 - DNA, 20 bp, Artificial sequence
  Synthetic oligonucleotide
atctatacttatatccacat

SEQ ID NO: 393 - DNA, 20 bp, Artificial sequence
  Synthetic oligonucleotide
aatctatacttatatccaca

SEQ ID NO: 394 - DNA, 20 bp, Artificial sequence
  Synthetic oligonucleotide
gaatctatacttatatccac

SEQ ID NO: 395 - DNA, 20 bp, Artificial sequence
  Synthetic oligonucleotide
agaatctatacttatatcca

SEQ ID NO: 396 - DNA, 20 bp, Artificial sequence
  Synthetic oligonucleotide
aagaatctatacttatatcc

SEQ ID NO: 397 - DNA, 20 bp, Artificial sequence
  Synthetic oligonucleotide
ccaaagaatctatacttata

SEQ ID NO: 398 - DNA, 20 bp, Artificial sequence
  Synthetic oligonucleotide
cccaaagaatctatacttat

SEQ ID NO: 399 - DNA, 20 bp, Artificial sequence
  Synthetic oligonucleotide
ccccaaagaatctatactta

SEQ ID NO: 400 - DNA, 20 bp, Artificial sequence
  Synthetic oligonucleotide
tccccaaagaatctatactt

SEQ ID NO: 401 - DNA, 20 bp, Artificial sequence
  Synthetic oligonucleotide
ttccccaaagaatctatact

SEQ ID NO: 402 - DNA, 20 bp, Artificial sequence
  Synthetic oligonucleotide
cttccccaaagaatctatac

SEQ ID NO: 403 - DNA, 20 bp, Artificial sequence
  Synthetic oligonucleotide
tctctgcatcttccccaaag

SEQ ID NO: 404 - DNA, 20 bp, Artificial sequence
  Synthetic oligonucleotide
atctctgcatcttccccaaa

SEQ ID NO: 405 - DNA, 20 bp, Artificial sequence
  Synthetic oligonucleotide
aatctctgcatcttccccaa

SEQ ID NO: 406 - DNA, 20 bp, Artificial sequence
  Synthetic oligonucleotide
caatctctgcatcttcccca

SEQ ID NO: 407 - DNA, 20 bp, Artificial sequence
  Synthetic oligonucleotide
taaatattgagctctcgggc

SEQ ID NO: 408 - DNA, 20 bp, Artificial sequence
  Synthetic oligonucleotide
ataaatattgagctctcggg

SEQ ID NO: 409 - DNA, 20 bp, Artificial sequence
  Synthetic oligonucleotide
aataaatattgagctctcgg

SEQ ID NO: 410 - DNA, 20 bp, Artificial sequence
  Synthetic oligonucleotide
gatctaaatggcaataaata

SEQ ID NO: 411 - DNA, 20 bp, Artificial sequence
  Synthetic oligonucleotide
tgatctaaatggcaataaat

SEQ ID NO: 412 - DNA, 20 bp, Artificial sequence
  Synthetic oligonucleotide
gtgatctaaatggcaataaa

SEQ ID NO: 413 - DNA, 20 bp, Artificial sequence
  Synthetic oligonucleotide
tgtgatctaaatggcaataa

SEQ ID NO: 414 - DNA, 20 bp, Artificial sequence
  Synthetic oligonucleotide
ttgtgatctaaatggcaata

SEQ ID NO: 415 - DNA, 20 bp, Artificial sequence
  Synthetic oligonucleotide
gttgtgatctaaatggcaat

SEQ ID NO: 416 - DNA, 20 bp, Artificial sequence
  Synthetic oligonucleotide
agttgtgatctaaatggcaa

SEQ ID NO: 417 - DNA, 20 bp, Artificial sequence
  Synthetic oligonucleotide
aagttgtgatctaaatggca

SEQ ID NO: 418 - DNA, 20 bp, Artificial sequence
  Synthetic oligonucleotide
aaagttgtgatctaaatggc

SEQ ID NO: 419 - DNA, 20 bp, Artificial sequence
  Synthetic oligonucleotide
taaagttgtgatctaaatgg

SEQ ID NO: 420 - DNA, 20 bp, Artificial sequence
  Synthetic oligonucleotide
ataaagttgtgatctaaatg

SEQ ID NO: 421 - DNA, 20 bp, Artificial sequence
  Synthetic oligonucleotide
cataaagttgtgatctaaat

SEQ ID NO: 422 - DNA, 20 bp, Artificial sequence
  Synthetic oligonucleotide
tcataaagttgtgatctaaa

SEQ ID NO: 423 - DNA, 20 bp, Artificial sequence
  Synthetic oligonucleotide
gtcataaagttgtgatctaa

SEQ ID NO: 424 - DNA, 20 bp, Artificial sequence
  Synthetic oligonucleotide
tgtcataaagttgtgatcta

SEQ ID NO: 425 - DNA, 20 bp, Artificial sequence
  Synthetic oligonucleotide
ctgtcataaagttgtgatct

SEQ ID NO: 426 - DNA, 20 bp, Artificial sequence
  Synthetic oligonucleotide
gctgtcataaagttgtgatc

SEQ ID NO: 427 - DNA, 20 bp, Artificial sequence
  Synthetic oligonucleotide
tgctgtcataaagttgtgat

SEQ ID NO: 428 - DNA, 20 bp, Artificial sequence
  Synthetic oligonucleotide
ttgctgtcataaagttgtga

SEQ ID NO: 429 - DNA, 20 bp, Artificial sequence
  Synthetic oligonucleotide
cttgctgtcataaagttgtg

SEQ ID NO: 430 - DNA, 20 bp, Artificial sequence
  Synthetic oligonucleotide
acttgctgtcataaagttgt

SEQ ID NO: 431 - DNA, 20 bp, Artificial sequence
  Synthetic oligonucleotide
tacttgctgtcataaagttg

SEQ ID NO: 432 - DNA, 20 bp, Artificial sequence
  Synthetic oligonucleotide
atacttgctgtcataaagtt

SEQ ID NO: 433 - DNA, 20 bp, Artificial sequence
  Synthetic oligonucleotide
gtatacttgctgtcataaag

SEQ ID NO: 434 - DNA, 20 bp, Artificial sequence
  Synthetic oligonucleotide
ggtatacttgctgtcataaa

SEQ ID NO: 435 - DNA, 20 bp, Artificial sequence
  Synthetic oligonucleotide
aggtatacttgctgtcataa

SEQ ID NO: 436 - DNA, 20 bp, Artificial sequence
  Synthetic oligonucleotide
taggtatacttgctgtcata

SEQ ID NO: 437 - DNA, 20 bp, Artificial sequence
  Synthetic oligonucleotide
gtaggtatacttgctgtcat

SEQ ID NO: 438 - DNA, 20 bp, Artificial sequence
  Synthetic oligonucleotide
agtaggtatacttgctgtca

SEQ ID NO: 439 - DNA, 20 bp, Artificial sequence
  Synthetic oligonucleotide
cagtctgtgagtaggtatac

SEQ ID NO: 440 - DNA, 20 bp, Artificial sequence
  Synthetic oligonucleotide
acagtctgtgagtaggtata

SEQ ID NO: 441 - DNA, 20 bp, Artificial sequence
  Synthetic oligonucleotide
aacagtctgtgagtaggtat

SEQ ID NO: 442 - DNA, 20 bp, Artificial sequence
  Synthetic oligonucleotide
aaacagtctgtgagtaggta

SEQ ID NO: 443 - DNA, 20 bp, Artificial sequence
  Synthetic oligonucleotide
caaacagtctgtgagtaggt

SEQ ID NO: 444 - DNA, 20 bp, Artificial sequence
  Synthetic oligonucleotide
acaaacagtctgtgagtagg

SEQ ID NO: 445 - DNA, 20 bp, Artificial sequence
  Synthetic oligonucleotide
aacaaacagtctgtgagtag

SEQ ID NO: 446 - DNA, 20 bp, Artificial sequence
  Synthetic oligonucleotide
gaacaaacagtctgtgagta

SEQ ID NO: 447 - DNA, 20 bp, Artificial sequence
  Synthetic oligonucleotide
tgaacaaacagtctgtgagt

SEQ ID NO: 448 - DNA, 20 bp, Artificial sequence
  Synthetic oligonucleotide
atgaacaaacagtctgtgag

SEQ ID NO: 449 - DNA, 20 bp, Artificial sequence
  Synthetic oligonucleotide
catgaacaaacagtctgtga

SEQ ID NO: 450 - DNA, 20 bp, Artificial sequence
  Synthetic oligonucleotide
acatgaacaaacagtctgtg

SEQ ID NO: 451 - DNA, 20 bp, Artificial sequence
  Synthetic oligonucleotide
tacatgaacaaacagtctgt

SEQ ID NO: 452 - DNA, 20 bp, Artificial sequence
  Synthetic oligonucleotide
gtacatgaacaaacagtctg

SEQ ID NO: 453 - DNA, 20 bp, Artificial sequence
  Synthetic oligonucleotide
cgtacatgaacaaacagtct

SEQ ID NO: 454 - DNA, 20 bp, Artificial sequence
  Synthetic oligonucleotide
gcgtacatgaacaaacagtc

SEQ ID NO: 455 - DNA, 20 bp, Artificial sequence
  Synthetic oligonucleotide
ggcgtacatgaacaaacagt

SEQ ID NO: 456 - DNA, 20 bp, Artificial sequence
  Synthetic oligonucleotide
cggcgtacatgaacaaacag

SEQ ID NO: 457 - DNA, 20 bp, Artificial sequence
  Synthetic oligonucleotide
gcggcgtacatgaacaaaca

SEQ ID NO: 458 - DNA, 20 bp, Artificial sequence
  Synthetic oligonucleotide
ggcggcgtacatgaacaaac

SEQ ID NO: 459 - DNA, 20 bp, Artificial sequence
  Synthetic oligonucleotide
aggcggcgtacatgaacaaa

SEQ ID NO: 460 - DNA, 20 bp, Artificial sequence
  Synthetic oligonucleotide
caggcggcgtacatgaacaa

SEQ ID NO: 461 - DNA, 20 bp, Artificial sequence
  Synthetic oligonucleotide
ttatatccttttgccaccag

SEQ ID NO: 462 - DNA, 20 bp, Artificial sequence
  Synthetic oligonucleotide
cttatatccttttgccacca

SEQ ID NO: 463 - DNA, 20 bp, Artificial sequence
  Synthetic oligonucleotide
ccttatatccttttgccacc

SEQ ID NO: 464 - DNA, 20 bp, Artificial sequence
  Synthetic oligonucleotide
accttatatccttttgccac

SEQ ID NO: 465 - DNA, 20 bp, Artificial sequence
  Synthetic oligonucleotide
caccttatatccttttgcca

SEQ ID NO: 466 - DNA, 20 bp, Artificial sequence
  Synthetic oligonucleotide
ccaccttatatccttttgcc

SEQ ID NO: 467 - DNA, 20 bp, Artificial sequence
  Synthetic oligonucleotide
cccaccttatatccttttgc

SEQ ID NO: 468 - DNA, 20 bp, Artificial sequence
  Synthetic oligonucleotide
tcccaccttatatccttttg

SEQ ID NO: 469 - DNA, 20 bp, Artificial sequence
  Synthetic oligonucleotide
ctcccaccttatatcctttt

SEQ ID NO: 470 - DNA, 20 bp, Artificial sequence
  Synthetic oligonucleotide
actcccaccttatatccttt

SEQ ID NO: 471 - DNA, 20 bp, Artificial sequence
  Synthetic oligonucleotide
aactcccaccttatatcctt

SEQ ID NO: 472 - DNA, 20 bp, Artificial sequence
  Synthetic oligonucleotide
caactcccaccttatatcct

SEQ ID NO: 473 - DNA, 20 bp, Artificial sequence
  Synthetic oligonucleotide
acaactcccaccttatatcc

SEQ ID NO: 474 - DNA, 20 bp, Artificial sequence
  Synthetic oligonucleotide
cacaactcccaccttatatc

SEQ ID NO: 475 - DNA, 20 bp, Artificial sequence
  Synthetic oligonucleotide
tcacaactcccaccttatat

SEQ ID NO: 476 - DNA, 20 bp, Artificial sequence
  Synthetic oligonucleotide
ttcacaactcccaccttata

SEQ ID NO: 477 - DNA, 20 bp, Artificial sequence
  Synthetic oligonucleotide
cttcacaactcccaccttat

SEQ ID NO: 478 - DNA, 20 bp, Artificial sequence
  Synthetic oligonucleotide
gcttcacaactcccacctta

SEQ ID NO: 479 - DNA, 20 bp, Artificial sequence
  Synthetic oligonucleotide
tgcttcacaactcccacctt

SEQ ID NO: 480 - DNA, 20 bp, Artificial sequence
  Synthetic oligonucleotide
ttgcttcacaactcccacct

SEQ ID NO: 481 - DNA, 20 bp, Artificial sequence
  Synthetic oligonucleotide
tttgcttcacaactcccacc

SEQ ID NO: 482 - DNA, 20 bp, Artificial sequence
  Synthetic oligonucleotide
gtttgcttcacaactcccac

SEQ ID NO: 483 - DNA, 20 bp, Artificial sequence
  Synthetic oligonucleotide
agtttgcttcacaactccca

SEQ ID NO: 484 - DNA, 20 bp, Artificial sequence
  Synthetic oligonucleotide
cagtttgcttcacaactccc

SEQ ID NO: 485 - DNA, 20 bp, Artificial sequence
  Synthetic oligonucleotide
tcagtttgcttcacaactcc

SEQ ID NO: 486 - DNA, 20 bp, Artificial sequence
  Synthetic oligonucleotide
ttcagtttgcttcacaactc

SEQ ID NO: 487 - DNA, 20 bp, Artificial sequence
  Synthetic oligonucleotide
tttcagtttgcttcacaact

SEQ ID NO: 488 - DNA, 20 bp, Artificial sequence
  Synthetic oligonucleotide
gtttcagtttgcttcacaac

SEQ ID NO: 489 - DNA, 20 bp, Artificial sequence
  Synthetic oligonucleotide
agtttcagtttgcttcacaa

SEQ ID NO: 490 - DNA, 20 bp, Artificial sequence
  Synthetic oligonucleotide
cagtttcagtttgcttcaca

SEQ ID NO: 491 - DNA, 20 bp, Artificial sequence
  Synthetic oligonucleotide
gcagtttcagtttgcttcac

SEQ ID NO: 492 - DNA, 20 bp, Artificial sequence
  Synthetic oligonucleotide
atgctgcagtttcagtttgc

SEQ ID NO: 493 - DNA, 20 bp, Artificial sequence
  Synthetic oligonucleotide
aatgctgcagtttcagtttg

SEQ ID NO: 494 - DNA, 20 bp, Artificial sequence
  Synthetic oligonucleotide
taatgctgcagtttcagttt

SEQ ID NO: 495 - DNA, 20 bp, Artificial sequence
  Synthetic oligonucleotide
ttaatgctgcagtttcagtt

SEQ ID NO: 496 - DNA, 20 bp, Artificial sequence
  Synthetic oligonucleotide
tttaatgctgcagtttcagt

SEQ ID NO: 497 - DNA, 20 bp, Artificial sequence
  Synthetic oligonucleotide
cctttaatgctgcagtttca

SEQ ID NO: 498 - DNA, 20 bp, Artificial sequence
  Synthetic oligonucleotide
gcctttaatgctgcagtttc

SEQ ID NO: 499 - DNA, 20 bp, Artificial sequence
  Synthetic oligonucleotide
ggcctttaatgctgcagttt

SEQ ID NO: 500 - DNA, 20 bp, Artificial sequence
  Synthetic oligonucleotide
tggcctttaatgctgcagtt

SEQ ID NO: 501 - DNA, 20 bp, Artificial sequence
  Synthetic oligonucleotide
atggcctttaatgctgcagt

SEQ ID NO: 502 - DNA, 20 bp, Artificial sequence
  Synthetic oligonucleotide
aatggcctttaatgctgcag

SEQ ID NO: 503 - DNA, 20 bp, Artificial sequence
  Synthetic oligonucleotide
caatggcctttaatgctgca

SEQ ID NO: 504 - DNA, 20 bp, Artificial sequence
  Synthetic oligonucleotide
ccaatggcctttaatgctgc

SEQ ID NO: 505 - DNA, 20 bp, Artificial sequence
  Synthetic oligonucleotide
tccaatggcctttaatgctg

SEQ ID NO: 506 - DNA, 20 bp, Artificial sequence
  Synthetic oligonucleotide
ctccaatggcctttaatgct

SEQ ID NO: 507 - DNA, 20 bp, Artificial sequence
  Synthetic oligonucleotide
tctccaatggcctttaatgc

SEQ ID NO: 508 - DNA, 20 bp, Artificial sequence
  Synthetic oligonucleotide
gtctccaatggcctttaatg

SEQ ID NO: 509 - DNA, 20 bp, Artificial sequence
  Synthetic oligonucleotide
tgtctccaatggcctttaat

SEQ ID NO: 510 - DNA, 20 bp, Artificial sequence
  Synthetic oligonucleotide
ttgtctccaatggcctttaa

SEQ ID NO: 511 - DNA, 20 bp, Artificial sequence
  Synthetic oligonucleotide
gttgtctccaatggccttta

SEQ ID NO: 512 - DNA, 20 bp, Artificial sequence
  Synthetic oligonucleotide
tgttgtctccaatggccttt

SEQ ID NO: 513 - DNA, 20 bp, Artificial sequence
  Synthetic oligonucleotide
ctgttgtctccaatggcctt

SEQ ID NO: 514 - DNA, 20 bp, Artificial sequence
  Synthetic oligonucleotide
tctgttgtctccaatggcct

SEQ ID NO: 515 - DNA, 20 bp, Artificial sequence
  Synthetic oligonucleotide
ttctgttgtctccaatggcc

SEQ ID NO: 516 - DNA, 20 bp, Artificial sequence
  Synthetic oligonucleotide
cttctgttgtctccaatggc

SEQ ID NO: 517 - DNA, 20 bp, Artificial sequence
  Synthetic oligonucleotide
acttctgttgtctccaatgg

SEQ ID NO: 518 - DNA, 20 bp, Artificial sequence
  Synthetic oligonucleotide
aacttctgttgtctccaatg

SEQ ID NO: 519 - DNA, 20 bp, Artificial sequence
  Synthetic oligonucleotide
gaacttctgttgtctccaat

SEQ ID NO: 520 - DNA, 20 bp, Artificial sequence
  Synthetic oligonucleotide
tgaacttctgttgtctccaa

SEQ ID NO: 521 - DNA, 20 bp, Artificial sequence
  Synthetic oligonucleotide
gtgaacttctgttgtctcca

SEQ ID NO: 522 - DNA, 20 bp, Artificial sequence
  Synthetic oligonucleotide
agtgaacttctgttgtctcc

SEQ ID NO: 523 - DNA, 20 bp, Artificial sequence
  Synthetic oligonucleotide
gagtgaacttctgttgtctc

SEQ ID NO: 524 - DNA, 20 bp, Artificial sequence
  Synthetic oligonucleotide
agagtgaacttctgttgtct

SEQ ID NO: 525 - DNA, 20 bp, Artificial sequence
  Synthetic oligonucleotide
aagagtgaacttctgttgtc

SEQ ID NO: 526 - DNA, 20 bp, Artificial sequence
  Synthetic oligonucleotide
aaagagtgaacttctgttgt

SEQ ID NO: 527 - DNA, 20 bp, Artificial sequence
  Synthetic oligonucleotide
aaaagagtgaacttctgttg

SEQ ID NO: 528 - DNA, 20 bp, Artificial sequence
  Synthetic oligonucleotide
ggaaaagagtgaacttctgt

SEQ ID NO: 529 - DNA, 20 bp, Artificial sequence
  Synthetic oligonucleotide
gggaaaagagtgaacttctg

SEQ ID NO: 530 - DNA, 20 bp, Artificial sequence
  Synthetic oligonucleotide
cgggaaaagagtgaacttct

SEQ ID NO: 531 - DNA, 20 bp, Artificial sequence
  Synthetic oligonucleotide
ccgggaaaagagtgaacttc

SEQ ID NO: 532 - DNA, 20 bp, Artificial sequence
  Synthetic oligonucleotide
tccgggaaaagagtgaactt

SEQ ID NO: 533 - DNA, 20 bp, Artificial sequence
  Synthetic oligonucleotide
ttccgggaaaagagtgaact

SEQ ID NO: 534 - DNA, 20 bp, Artificial sequence
  Synthetic oligonucleotide
tttccgggaaaagagtgaac

SEQ ID NO: 535 - DNA, 20 bp, Artificial sequence
  Synthetic oligonucleotide
atttccgggaaaagagtgaa

SEQ ID NO: 536 - DNA, 20 bp, Artificial sequence
  Synthetic oligonucleotide
aatttccgggaaaagagtga

SEQ ID NO: 537 - DNA, 20 bp, Artificial sequence
  Synthetic oligonucleotide
caatttccgggaaaagagtg

SEQ ID NO: 538 - DNA, 20 bp, Artificial sequence
  Synthetic oligonucleotide
tcaatttccgggaaaagagt

SEQ ID NO: 539 - DNA, 20 bp, Artificial sequence
  Synthetic oligonucleotide
gtcaatttccgggaaaagag

SEQ ID NO: 540 - DNA, 20 bp, Artificial sequence
  Synthetic oligonucleotide
agtcaatttccgggaaaaga

SEQ ID NO: 541 - DNA, 20 bp, Artificial sequence
  Synthetic oligonucleotide
cagtcaatttccgggaaaag

SEQ ID NO: 542 - DNA, 20 bp, Artificial sequence
  Synthetic oligonucleotide
gcagtcaatttccgggaaaa

SEQ ID NO: 543 - DNA, 20 bp, Artificial sequence
  Synthetic oligonucleotide
ggcagtcaatttccgggaaa

SEQ ID NO: 544 - DNA, 20 bp, Artificial sequence
  Synthetic oligonucleotide
gggcagtcaatttccgggaa

SEQ ID NO: 545 - DNA, 20 bp, Artificial sequence
  Synthetic oligonucleotide
agggcagtcaatttccggga

SEQ ID NO: 546 - DNA, 20 bp, Artificial sequence
  Synthetic oligonucleotide
aagggcagtcaatttccggg

SEQ ID NO: 547 - DNA, 20 bp, Artificial sequence
  Synthetic oligonucleotide
aaagggcagtcaatttccgg

SEQ ID NO: 548 - DNA, 20 bp, Artificial sequence
  Synthetic oligonucleotide
taaagggcagtcaatttccg

SEQ ID NO: 549 - DNA, 20 bp, Artificial sequence
  Synthetic oligonucleotide
ataaagggcagtcaatttcc

SEQ ID NO: 550 - DNA, 20 bp, Artificial sequence
  Synthetic oligonucleotide
tataaagggcagtcaatttc

SEQ ID NO: 551 - DNA, 20 bp, Artificial sequence
  Synthetic oligonucleotide
gtataaagggcagtcaattt

SEQ ID NO: 552 - DNA, 20 bp, Artificial sequence
  Synthetic oligonucleotide
tgtataaagggcagtcaatt

SEQ ID NO: 553 - DNA, 20 bp, Artificial sequence
  Synthetic oligonucleotide
ttgtataaagggcagtcaat

SEQ ID NO: 554 - DNA, 20 bp, Artificial sequence
  Synthetic oligonucleotide
tttgtataaagggcagtcaa

SEQ ID NO: 555 - DNA, 20 bp, Artificial sequence
  Synthetic oligonucleotide
ttttgtataaagggcagtca

SEQ ID NO: 556 - DNA, 20 bp, Artificial sequence
  Synthetic oligonucleotide
attttgtataaagggcagtc

SEQ ID NO: 557 - DNA, 20 bp, Artificial sequence
  Synthetic oligonucleotide
gattttgtataaagggcagt

SEQ ID NO: 558 - DNA, 20 bp, Artificial sequence
  Synthetic oligonucleotide
agattttgtataaagggcag

SEQ ID NO: 559 - DNA, 20 bp, Artificial sequence
  Synthetic oligonucleotide
tagattttgtataaagggca

SEQ ID NO: 560 - DNA, 20 bp, Artificial sequence
  Synthetic oligonucleotide
gtagattttgtataaagggc

SEQ ID NO: 561 - DNA, 20 bp, Artificial sequence
  Synthetic oligonucleotide
tgtagattttgtataaaggg

SEQ ID NO: 562 - DNA, 20 bp, Artificial sequence
  Synthetic oligonucleotide
gtgtagattttgtataaagg

SEQ ID NO: 563 - DNA, 20 bp, Artificial sequence
  Synthetic oligonucleotide
agtgtagattttgtataaag

SEQ ID NO: 564 - DNA, 20 bp, Artificial sequence
  Synthetic oligonucleotide
caataagtgtagattttgta

SEQ ID NO: 565 - DNA, 20 bp, Artificial sequence
  Synthetic oligonucleotide
ccaataagtgtagattttgt

SEQ ID NO: 566 - DNA, 20 bp, Artificial sequence
  Synthetic oligonucleotide
tccaataagtgtagattttg

SEQ ID NO: 567 - DNA, 20 bp, Artificial sequence
  Synthetic oligonucleotide
ctccaataagtgtagatttt

SEQ ID NO: 568 - DNA, 20 bp, Artificial sequence
  Synthetic oligonucleotide
tctccaataagtgtagattt

SEQ ID NO: 569 - DNA, 20 bp, Artificial sequence
  Synthetic oligonucleotide
ttctccaataagtgtagatt

SEQ ID NO: 570 - DNA, 20 bp, Artificial sequence
  Synthetic oligonucleotide
cttctccaataagtgtagat

SEQ ID NO: 571 - DNA, 20 bp, Artificial sequence
  Synthetic oligonucleotide
tcttctccaataagtgtaga

SEQ ID NO: 572 - DNA, 20 bp, Artificial sequence
  Synthetic oligonucleotide
atcttctccaataagtgtag

SEQ ID NO: 573 - DNA, 20 bp, Artificial sequence
  Synthetic oligonucleotide
catcttctccaataagtgta

SEQ ID NO: 574 - DNA, 20 bp, Artificial sequence
  Synthetic oligonucleotide
acatcttctccaataagtgt

SEQ ID NO: 575 - DNA, 20 bp, Artificial sequence
  Synthetic oligonucleotide
cacatcttctccaataagtg

SEQ ID NO: 576 - DNA, 20 bp, Artificial sequence
  Synthetic oligonucleotide
tcacatcttctccaataagt

SEQ ID NO: 577 - DNA, 20 bp, Artificial sequence
  Synthetic oligonucleotide
ttcacatcttctccaataag

SEQ ID NO: 578 - DNA, 20 bp, Artificial sequence
  Synthetic oligonucleotide
attcacatcttctccaataa

SEQ ID NO: 579 - DNA, 20 bp, Artificial sequence
  Synthetic oligonucleotide
gattcacatcttctccaata

SEQ ID NO: 580 - DNA, 20 bp, Artificial sequence
  Synthetic oligonucleotide
ggattcacatcttctccaat

SEQ ID NO: 581 - DNA, 20 bp, Artificial sequence
  Synthetic oligonucleotide
gggattcacatcttctccaa

SEQ ID NO: 582 - DNA, 20 bp, Artificial sequence
  Synthetic oligonucleotide
atcatccagcttgattaggg

SEQ ID NO: 583 - DNA, 20 bp, Artificial sequence
  Synthetic oligonucleotide
catcatccagcttgattagg

SEQ ID NO: 584 - DNA, 20 bp, Artificial sequence
  Synthetic oligonucleotide
gcatcatccagcttgattag

SEQ ID NO: 585 - DNA, 20 bp, Artificial sequence
  Synthetic oligonucleotide
agcatcatccagcttgatta

SEQ ID NO: 586 - DNA, 20 bp, Artificial sequence
  Synthetic oligonucleotide
catttacagcatcatccagc

SEQ ID NO: 587 - DNA, 20 bp, Artificial sequence
  Synthetic oligonucleotide
acatttacagcatcatccag

SEQ ID NO: 588 - DNA, 20 bp, Artificial sequence
  Synthetic oligonucleotide
aacatttacagcatcatcca

SEQ ID NO: 589 - DNA, 20 bp, Artificial sequence
  Synthetic oligonucleotide
caacatttacagcatcatcc

SEQ ID NO: 590 - DNA, 20 bp, Artificial sequence
  Synthetic oligonucleotide
tcaacatttacagcatcatc

SEQ ID NO: 591 - DNA, 20 bp, Artificial sequence
  Synthetic oligonucleotide
atcaacatttacagcatcat

SEQ ID NO: 592 - DNA, 20 bp, Artificial sequence
  Synthetic oligonucleotide
catcaacatttacagcatca

SEQ ID NO: 593 - DNA, 20 bp, Artificial sequence
  Synthetic oligonucleotide
tcatcaacatttacagcatc

SEQ ID NO: 594 - DNA, 20 bp, Artificial sequence
  Synthetic oligonucleotide
ctcatcaacatttacagcat

SEQ ID NO: 595 - DNA, 20 bp, Artificial sequence
  Synthetic oligonucleotide
tctcatcaacatttacagca

SEQ ID NO: 596 - DNA, 20 bp, Artificial sequence
  Synthetic oligonucleotide
atctcatcaacatttacagc

SEQ ID NO: 597 - DNA, 20 bp, Artificial sequence
  Synthetic oligonucleotide
tatctcatcaacatttacag

SEQ ID NO: 598 - DNA, 20 bp, Artificial sequence
  Synthetic oligonucleotide
ttatctcatcaacatttaca

SEQ ID NO: 599 - DNA, 20 bp, Artificial sequence
  Synthetic oligonucleotide
attatctcatcaacatttac

SEQ ID NO: 600 - DNA, 20 bp, Artificial sequence
  Synthetic oligonucleotide
cattatctcatcaacattta

SEQ ID NO: 601 - DNA, 20 bp, Artificial sequence
  Synthetic oligonucleotide
tcattatctcatcaacattt

SEQ ID NO: 602 - DNA, 20 bp, Artificial sequence
  Synthetic oligonucleotide
gtcattatctcatcaacatt

SEQ ID NO: 603 - DNA, 20 bp, Artificial sequence
  Synthetic oligonucleotide
agtcattatctcatcaacat

SEQ ID NO: 604 - DNA, 20 bp, Artificial sequence
  Synthetic oligonucleotide
cagtcattatctcatcaaca

SEQ ID NO: 605 - DNA, 20 bp, Artificial sequence
  Synthetic oligonucleotide
tcagtcattatctcatcaac

SEQ ID NO: 606 - DNA, 20 bp, Artificial sequence
  Synthetic oligonucleotide
atcagtcattatctcatcaa

SEQ ID NO: 607 - DNA, 20 bp, Artificial sequence
  Synthetic oligonucleotide
tatcagtcattatctcatca

SEQ ID NO: 608 - DNA, 20 bp, Artificial sequence
  Synthetic oligonucleotide
gtatcagtcattatctcatc

SEQ ID NO: 609 - DNA, 20 bp, Artificial sequence
  Synthetic oligonucleotide
agtatcagtcattatctcat

SEQ ID NO: 610 - DNA, 20 bp, Artificial sequence
  Synthetic oligonucleotide
aagtatcagtcattatctca

SEQ ID NO: 611 - DNA, 20 bp, Artificial sequence
  Synthetic oligonucleotide
gaagtatcagtcattatctc

SEQ ID NO: 612 - DNA, 20 bp, Artificial sequence
  Synthetic oligonucleotide
agaagtatcagtcattatct

SEQ ID NO: 613 - DNA, 20 bp, Artificial sequence
  Synthetic oligonucleotide
tagaagtatcagtcattatc

SEQ ID NO: 614 - DNA, 20 bp, Artificial sequence
  Synthetic oligonucleotide
gtagaagtatcagtcattat

SEQ ID NO: 615 - DNA, 20 bp, Artificial sequence
  Synthetic oligonucleotide
ggtagaagtatcagtcatta

SEQ ID NO: 616 - DNA, 20 bp, Artificial sequence
  Synthetic oligonucleotide
tggtagaagtatcagtcatt

SEQ ID NO: 617 - DNA, 20 bp, Artificial sequence
  Synthetic oligonucleotide
ctggtagaagtatcagtcat

SEQ ID NO: 618 - DNA, 20 bp, Artificial sequence
  Synthetic oligonucleotide
gctggtagaagtatcagtca

SEQ ID NO: 619 - DNA, 20 bp, Artificial sequence
  Synthetic oligonucleotide
agctggtagaagtatcagtc

SEQ ID NO: 620 - DNA, 20 bp, Artificial sequence
  Synthetic oligonucleotide
tagctggtagaagtatcagt

SEQ ID NO: 621 - DNA, 20 bp, Artificial sequence
  Synthetic oligonucleotide
gatagctggtagaagtatca

SEQ ID NO: 622 - DNA, 20 bp, Artificial sequence
  Synthetic oligonucleotide
agatagctggtagaagtatc

SEQ ID NO: 623 - DNA, 20 bp, Artificial sequence
  Synthetic oligonucleotide
aagatagctggtagaagtat

SEQ ID NO: 624 - DNA, 20 bp, Artificial sequence
  Synthetic oligonucleotide
gaagatagctggtagaagta

SEQ ID NO: 625 - DNA, 20 bp, Artificial sequence
  Synthetic oligonucleotide
agaagatagctggtagaagt

SEQ ID NO: 626 - DNA, 20 bp, Artificial sequence
  Synthetic oligonucleotide
cagaagatagctggtagaag

SEQ ID NO: 627 - DNA, 20 bp, Artificial sequence
  Synthetic oligonucleotide
acagaagatagctggtagaa

SEQ ID NO: 628 - DNA, 20 bp, Artificial sequence
  Synthetic oligonucleotide
cacagaagatagctggtaga

SEQ ID NO: 629 - DNA, 20 bp, Artificial sequence
  Synthetic oligonucleotide
gcacagaagatagctggtag

SEQ ID NO: 630 - DNA, 20 bp, Artificial sequence
  Synthetic oligonucleotide
tgcacagaagatagctggta

SEQ ID NO: 631 - DNA, 20 bp, Artificial sequence
  Synthetic oligonucleotide
atgcacagaagatagctggt

SEQ ID NO: 632 - DNA, 20 bp, Artificial sequence
  Synthetic oligonucleotide
gatgcacagaagatagctgg

SEQ ID NO: 633 - DNA, 20 bp, Artificial sequence
  Synthetic oligonucleotide
gagatgcacagaagatagct

SEQ ID NO: 634 - DNA, 20 bp, Artificial sequence
  Synthetic oligonucleotide
agagatgcacagaagatagc

SEQ ID NO: 635 - DNA, 20 bp, Artificial sequence
  Synthetic oligonucleotide
cagagatgcacagaagatag

SEQ ID NO: 636 - DNA, 20 bp, Artificial sequence
  Synthetic oligonucleotide
tcagagatgcacagaagata

SEQ ID NO: 637 - DNA, 20 bp, Artificial sequence
  Synthetic oligonucleotide
ttcagagatgcacagaagat

SEQ ID NO: 638 - DNA, 20 bp, Artificial sequence
  Synthetic oligonucleotide
tttcagagatgcacagaaga

SEQ ID NO: 639 - DNA, 20 bp, Artificial sequence
  Synthetic oligonucleotide
ttttcagagatgcacagaag

SEQ ID NO: 640 - DNA, 20 bp, Artificial sequence
  Synthetic oligonucleotide
attttcagagatgcacagaa

SEQ ID NO: 641 - DNA, 20 bp, Artificial sequence
  Synthetic oligonucleotide
tattttcagagatgcacaga

SEQ ID NO: 642 - DNA, 20 bp, Artificial sequence
  Synthetic oligonucleotide
ttattttcagagatgcacag

SEQ ID NO: 643 - DNA, 20 bp, Artificial sequence
  Synthetic oligonucleotide
cttattttcagagatgcaca

SEQ ID NO: 644 - DNA, 20 bp, Artificial sequence
  Synthetic oligonucleotide
ccttattttcagagatgcac

SEQ ID NO: 645 - DNA, 20 bp, Artificial sequence
  Synthetic oligonucleotide
tccttattttcagagatgca

SEQ ID NO: 646 - DNA, 20 bp, Artificial sequence
  Synthetic oligonucleotide
ttccttattttcagagatgc

SEQ ID NO: 647 - DNA, 20 bp, Artificial sequence
  Synthetic oligonucleotide
tttccttattttcagagatg

SEQ ID NO: 648 - DNA, 20 bp, Artificial sequence
  Synthetic oligonucleotide
ttttccttattttcagagat

SEQ ID NO: 649 - DNA, 20 bp, Artificial sequence
  Synthetic oligonucleotide
attttccttattttcagaga

SEQ ID NO: 650 - DNA, 20 bp, Artificial sequence
  Synthetic oligonucleotide
cattttccttattttcagag

SEQ ID NO: 651 - DNA, 20 bp, Artificial sequence
  Synthetic oligonucleotide
acattttccttattttcaga

SEQ ID NO: 652 - DNA, 20 bp, Artificial sequence
  Synthetic oligonucleotide
aacattttccttattttcag

SEQ ID NO: 653 - DNA, 20 bp, Artificial sequence
  Synthetic oligonucleotide
ctaacattttccttattttc

SEQ ID NO: 654 - DNA, 20 bp, Artificial sequence
  Synthetic oligonucleotide
cctaacattttccttatttt

SEQ ID NO: 655 - DNA, 20 bp, Artificial sequence
  Synthetic oligonucleotide
ccctaacattttccttattt

SEQ ID NO: 656 - DNA, 20 bp, Artificial sequence
  Synthetic oligonucleotide
tccctaacattttccttatt

SEQ ID NO: 657 - DNA, 20 bp, Artificial sequence
  Synthetic oligonucleotide
gtccctaacattttccttat

SEQ ID NO: 658 - DNA, 20 bp, Artificial sequence
  Synthetic oligonucleotide
tgtccctaacattttcctta

SEQ ID NO: 659 - DNA, 20 bp, Artificial sequence
  Synthetic oligonucleotide
ttgtccctaacattttcctt

SEQ ID NO: 660 - DNA, 20 bp, Artificial sequence
  Synthetic oligonucleotide
tttgtccctaacattttcct

SEQ ID NO: 661 - DNA, 20 bp, Artificial sequence
  Synthetic oligonucleotide
ttttgtccctaacattttcc

SEQ ID NO: 662 - DNA, 20 bp, Artificial sequence
  Synthetic oligonucleotide
tttttgtccctaacattttc

SEQ ID NO: 663 - DNA, 20 bp, Artificial sequence
  Synthetic oligonucleotide
ataaaaatgttgcccttttt

SEQ ID NO: 664 - DNA, 20 bp, Artificial sequence
  Synthetic oligonucleotide
aataaaaatgttgccctttt

SEQ ID NO: 665 - DNA, 20 bp, Artificial sequence
  Synthetic oligonucleotide
caataaaaatgttgcccttt

SEQ ID NO: 666 - DNA, 20 bp, Artificial sequence
  Synthetic oligonucleotide
ccaataaaaatgttgccctt

SEQ ID NO: 667 - DNA, 20 bp, Artificial sequence
  Synthetic oligonucleotide
gccaataaaaatgttgccct

SEQ ID NO: 668 - DNA, 20 bp, Artificial sequence
  Synthetic oligonucleotide
tgccaataaaaatgttgccc

SEQ ID NO: 669 - DNA, 20 bp, Artificial sequence
  Synthetic oligonucleotide
atgccaataaaaatgttgcc

SEQ ID NO: 670 - DNA, 20 bp, Artificial sequence
  Synthetic oligonucleotide
aatgccaataaaaatgttgc

SEQ ID NO: 671 - DNA, 20 bp, Artificial sequence
  Synthetic oligonucleotide
caatgccaataaaaatgttg

SEQ ID NO: 672 - DNA, 20 bp, Artificial sequence
  Synthetic oligonucleotide
acaatgccaataaaaatgtt

SEQ ID NO: 673 - DNA, 20 bp, Artificial sequence
  Synthetic oligonucleotide
cacaatgccaataaaaatgt

SEQ ID NO: 674 - DNA, 20 bp, Artificial sequence
  Synthetic oligonucleotide
ccacaatgccaataaaaatg

SEQ ID NO: 675 - DNA, 20 bp, Artificial sequence
  Synthetic oligonucleotide
cccacaatgccaataaaaat

SEQ ID NO: 676 - DNA, 20 bp, Artificial sequence
  Synthetic oligonucleotide
tcccacaatgccaataaaaa

SEQ ID NO: 677 - DNA, 20 bp, Artificial sequence
  Synthetic oligonucleotide
ctcccacaatgccaataaaa

SEQ ID NO: 678 - DNA, 20 bp, Artificial sequence
  Synthetic oligonucleotide
actcccacaatgccaataaa

SEQ ID NO: 679 - DNA, 20 bp, Artificial sequence
  Synthetic oligonucleotide
cactcccacaatgccaataa

SEQ ID NO: 680 - DNA, 20 bp, Artificial sequence
  Synthetic oligonucleotide
gcactcccacaatgccaata

SEQ ID NO: 681 - DNA, 20 bp, Artificial sequence
  Synthetic oligonucleotide
tcaaacacaacctcgcctgt

SEQ ID NO: 682 - DNA, 20 bp, Artificial sequence
  Synthetic oligonucleotide
atcaaacacaacctcgcctg

SEQ ID NO: 683 - DNA, 20 bp, Artificial sequence
  Synthetic oligonucleotide
tatcaaacacaacctcgcct

SEQ ID NO: 684 - DNA, 20 bp, Artificial sequence
  Synthetic oligonucleotide
ctatcaaacacaacctcgcc

SEQ ID NO: 685 - DNA, 20 bp, Artificial sequence
  Synthetic oligonucleotide
actatcaaacacaacctcgc

SEQ ID NO: 686 - DNA, 20 bp, Artificial sequence
  Synthetic oligonucleotide
aactatcaaacacaacctcg

SEQ ID NO: 687 - DNA, 20 bp, Artificial sequence
  Synthetic oligonucleotide
aaactatcaaacacaacctc

SEQ ID NO: 688 - DNA, 20 bp, Artificial sequence
  Synthetic oligonucleotide
gaaactatcaaacacaacct

SEQ ID NO: 689 - DNA, 20 bp, Artificial sequence
  Synthetic oligonucleotide
ggaaactatcaaacacaacc

SEQ ID NO: 690 - DNA, 20 bp, Artificial sequence
  Synthetic oligonucleotide
tggaaactatcaaacacaac

SEQ ID NO: 691 - DNA, 20 bp, Artificial sequence
  Synthetic oligonucleotide
ctggaaactatcaaacacaa

SEQ ID NO: 692 - DNA, 20 bp, Artificial sequence
  Synthetic oligonucleotide
cctggaaactatcaaacaca

SEQ ID NO: 693 - DNA, 20 bp, Artificial sequence
  Synthetic oligonucleotide
tcctggaaactatcaaacac

SEQ ID NO: 694 - DNA, 20 bp, Artificial sequence
  Synthetic oligonucleotide
gtcctggaaactatcaaaca

SEQ ID NO: 695 - DNA, 20 bp, Artificial sequence
  Synthetic oligonucleotide
agtcctggaaactatcaaac

SEQ ID NO: 696 - DNA, 20 bp, Artificial sequence
  Synthetic oligonucleotide
gagtcctggaaactatcaaa

SEQ ID NO: 697 - DNA, 20 bp, Artificial sequence
  Synthetic oligonucleotide
agagtcctggaaactatcaa

SEQ ID NO: 698 - DNA, 20 bp, Artificial sequence
  Synthetic oligonucleotide
cagagtcctggaaactatca

SEQ ID NO: 699 - DNA, 20 bp, Artificial sequence
  Synthetic oligonucleotide
tgaacgagaagcagagtcct

SEQ ID NO: 700 - DNA, 20 bp, Artificial sequence
  Synthetic oligonucleotide
ctgaacgagaagcagagtcc

SEQ ID NO: 701 - DNA, 20 bp, Artificial sequence
  Synthetic oligonucleotide
tctgaacgagaagcagagtc

SEQ ID NO: 702 - DNA, 20 bp, Artificial sequence
  Synthetic oligonucleotide
gggtttctagctctgaacga

SEQ ID NO: 703 - DNA, 20 bp, Artificial sequence
  Synthetic oligonucleotide
cgggtttctagctctgaacg

SEQ ID NO: 704 - DNA, 20 bp, Artificial sequence
  Synthetic oligonucleotide
ccgggtttctagctctgaac

SEQ ID NO: 705 - DNA, 20 bp, Artificial sequence
  Synthetic oligonucleotide
tccgggtttctagctctgaa

SEQ ID NO: 706 - DNA, 20 bp, Artificial sequence
  Synthetic oligonucleotide
atccgggtttctagctctga

SEQ ID NO: 707 - DNA, 20 bp, Artificial sequence
  Synthetic oligonucleotide
catccgggtttctagctctg

SEQ ID NO: 708 - DNA, 20 bp, Artificial sequence
  Synthetic oligonucleotide
acatccgggtttctagctct

SEQ ID NO: 709 - DNA, 20 bp, Artificial sequence
  Synthetic oligonucleotide
gacatccgggtttctagctc

SEQ ID NO: 710 - DNA, 20 bp, Artificial sequence
  Synthetic oligonucleotide
tgacatccgggtttctagct

SEQ ID NO: 711 - DNA, 20 bp, Artificial sequence
  Synthetic oligonucleotide
ttgacatccgggtttctagc

SEQ ID NO: 712 - DNA, 20 bp, Artificial sequence
  Synthetic oligonucleotide
cttgacatccgggtttctag

SEQ ID NO: 713 - DNA, 20 bp, Artificial sequence
  Synthetic oligonucleotide
gcttgacatccgggtttcta

SEQ ID NO: 714 - DNA, 20 bp, Artificial sequence
  Synthetic oligonucleotide
ggcttgacatccgggtttct

SEQ ID NO: 715 - DNA, 20 bp, Artificial sequence
  Synthetic oligonucleotide
aggcttgacatccgggtttc

SEQ ID NO: 716 - DNA, 20 bp, Artificial sequence
  Synthetic oligonucleotide
caggcttgacatccgggttt

SEQ ID NO: 717 - DNA, 20 bp, Artificial sequence
  Synthetic oligonucleotide
tctgtttgctcggacaaggc

SEQ ID NO: 718 - DNA, 20 bp, Artificial sequence
  Synthetic oligonucleotide
ctctgtttgctcggacaagg

SEQ ID NO: 719 - DNA, 20 bp, Artificial sequence
  Synthetic oligonucleotide
cctctgtttgctcggacaag

SEQ ID NO: 720 - DNA, 20 bp, Artificial sequence
  Synthetic oligonucleotide
gcctctgtttgctcggacaa

SEQ ID NO: 721 - DNA, 20 bp, Artificial sequence
  Synthetic oligonucleotide
tggatgagcgcctctgtttg

SEQ ID NO: 722 - DNA, 20 bp, Artificial sequence
  Synthetic oligonucleotide
gtggatgagcgcctctgttt

SEQ ID NO: 723 - DNA, 20 bp, Artificial sequence
  Synthetic oligonucleotide
tgtggatgagcgcctctgtt

SEQ ID NO: 724 - DNA, 20 bp, Artificial sequence
  Synthetic oligonucleotide
gatgtggctctgtggatgag

SEQ ID NO: 725 - DNA, 20 bp, Artificial sequence
  Synthetic oligonucleotide
agatgtggctctgtggatga

SEQ ID NO: 726 - DNA, 20 bp, Artificial sequence
  Synthetic oligonucleotide
cagatgtggctctgtggatg

SEQ ID NO: 727 - DNA, 20 bp, Artificial sequence
  Synthetic oligonucleotide
tcctgcacactaacagatgt

SEQ ID NO: 728 - DNA, 20 bp, Artificial sequence
  Synthetic oligonucleotide
atcctgcacactaacagatg

SEQ ID NO: 729 - DNA, 20 bp, Artificial sequence
  Synthetic oligonucleotide
catcctgcacactaacagat

SEQ ID NO: 730 - DNA, 20 bp, Artificial sequence
  Synthetic oligonucleotide
tcatcctgcacactaacaga

SEQ ID NO: 731 - DNA, 20 bp, Artificial sequence
  Synthetic oligonucleotide
gtcatcctgcacactaacag

SEQ ID NO: 732 - DNA, 20 bp, Artificial sequence
  Synthetic oligonucleotide
tgtcatcctgcacactaaca

SEQ ID NO: 733 - DNA, 20 bp, Artificial sequence
  Synthetic oligonucleotide
ctgtcatcctgcacactaac

SEQ ID NO: 734 - DNA, 20 bp, Artificial sequence
  Synthetic oligonucleotide
tctgtcatcctgcacactaa

SEQ ID NO: 735 - DNA, 20 bp, Artificial sequence
  Synthetic oligonucleotide
ttctgtcatcctgcacacta

SEQ ID NO: 736 - DNA, 20 bp, Artificial sequence
  Synthetic oligonucleotide
attctgtcatcctgcacact

SEQ ID NO: 737 - DNA, 20 bp, Artificial sequence
  Synthetic oligonucleotide
aattctgtcatcctgcacac

SEQ ID NO: 738 - DNA, 20 bp, Artificial sequence
  Synthetic oligonucleotide
gaattctgtcatcctgcaca

SEQ ID NO: 739 - DNA, 20 bp, Artificial sequence
  Synthetic oligonucleotide
cgaattctgtcatcctgcac

SEQ ID NO: 740 - DNA, 20 bp, Artificial sequence
  Synthetic oligonucleotide
tcgaattctgtcatcctgca

SEQ ID NO: 741 - DNA, 20 bp, Artificial sequence
  Synthetic oligonucleotide
ctcgaattctgtcatcctgc

SEQ ID NO: 742 - DNA, 20 bp, Artificial sequence
  Synthetic oligonucleotide
actcgaattctgtcatcctg

SEQ ID NO: 743 - DNA, 20 bp, Artificial sequence
  Synthetic oligonucleotide
gactcgaattctgtcatcct

SEQ ID NO: 744 - DNA, 20 bp, Artificial sequence
  Synthetic oligonucleotide
cgactcgaattctgtcatcc

SEQ ID NO: 745 - DNA, 20 bp, Artificial sequence
  Synthetic oligonucleotide
tcgactcgaattctgtcatc

SEQ ID NO: 746 - DNA, 20 bp, Artificial sequence
  Synthetic oligonucleotide
tatccatcctttcgactcga

SEQ ID NO: 747 - DNA, 20 bp, Artificial sequence
  Synthetic oligonucleotide
ttatccatcctttcgactcg

SEQ ID NO: 748 - DNA, 20 bp, Artificial sequence
  Synthetic oligonucleotide
gttatccatcctttcgactc

SEQ ID NO: 749 - DNA, 20 bp, Artificial sequence
  Synthetic oligonucleotide
tgttatccatcctttcgact

SEQ ID NO: 750 - DNA, 20 bp, Artificial sequence
  Synthetic oligonucleotide
atgttatccatcctttcgac

SEQ ID NO: 751 - DNA, 20 bp, Artificial sequence
  Synthetic oligonucleotide
aatgttatccatcctttcga

SEQ ID NO: 752 - DNA, 20 bp, Artificial sequence
  Synthetic oligonucleotide
aaatgttatccatcctttcg

SEQ ID NO: 753 - DNA, 20 bp, Artificial sequence
  Synthetic oligonucleotide
taaatgttatccatcctttc

SEQ ID NO: 754 - DNA, 20 bp, Artificial sequence
  Synthetic oligonucleotide
ataaatgttatccatccttt

SEQ ID NO: 755 - DNA, 20 bp, Artificial sequence
  Synthetic oligonucleotide
aataaatgttatccatcctt

SEQ ID NO: 756 - DNA, 20 bp, Artificial sequence
  Synthetic oligonucleotide
aaataaatgttatccatcct

SEQ ID NO: 757 - DNA, 20 bp, Artificial sequence
  Synthetic oligonucleotide
aaaataaatgttatccatcc

SEQ ID NO: 758 - DNA, 20 bp, Artificial sequence
  Synthetic oligonucleotide
caaaataaatgttatccatc

SEQ ID NO: 759 - DNA, 20 bp, Artificial sequence
  Synthetic oligonucleotide
gctgtattcaaaataaatgt

SEQ ID NO: 760 - DNA, 20 bp, Artificial sequence
  Synthetic oligonucleotide
ggctgtattcaaaataaatg

SEQ ID NO: 761 - DNA, 20 bp, Artificial sequence
  Synthetic oligonucleotide
tggctgtattcaaaataaat

SEQ ID NO: 762 - DNA, 20 bp, Artificial sequence
  Synthetic oligonucleotide
atggctgtattcaaaataaa

SEQ ID NO: 763 - DNA, 20 bp, Artificial sequence
  Synthetic oligonucleotide
catggctgtattcaaaataa

SEQ ID NO: 764 - DNA, 20 bp, Artificial sequence
  Synthetic oligonucleotide
gcatggctgtattcaaaata

SEQ ID NO: 765 - DNA, 20 bp, Artificial sequence
  Synthetic oligonucleotide
agcatggctgtattcaaaat

SEQ ID NO: 766 - DNA, 20 bp, Artificial sequence
  Synthetic oligonucleotide
aagcatggctgtattcaaaa

SEQ ID NO: 767 - DNA, 20 bp, Artificial sequence
  Synthetic oligonucleotide
aaagcatggctgtattcaaa

SEQ ID NO: 768 - DNA, 20 bp, Artificial sequence
  Synthetic oligonucleotide
gaaagcatggctgtattcaa

SEQ ID NO: 769 - DNA, 20 bp, Artificial sequence
  Synthetic oligonucleotide
ggaaagcatggctgtattca

SEQ ID NO: 770 - DNA, 20 bp, Artificial sequence
  Synthetic oligonucleotide
tggaaagcatggctgtattc

SEQ ID NO: 771 - DNA, 20 bp, Artificial sequence
  Synthetic oligonucleotide
ctggaaagcatggctgtatt

SEQ ID NO: 772 - DNA, 20 bp, Artificial sequence
  Synthetic oligonucleotide
cctggaaagcatggctgtat

SEQ ID NO: 773 - DNA, 20 bp, Artificial sequence
  Synthetic oligonucleotide
gcctggaaagcatggctgta

SEQ ID NO: 774 - DNA, 20 bp, Artificial sequence
  Synthetic oligonucleotide
tctgtaactgcctggaaagc

SEQ ID NO: 775 - DNA, 20 bp, Artificial sequence
  Synthetic oligonucleotide
ctctgtaactgcctggaaag

SEQ ID NO: 776 - DNA, 20 bp, Artificial sequence
  Synthetic oligonucleotide
actctgtaactgcctggaaa

SEQ ID NO: 777 - DNA, 20 bp, Artificial sequence
  Synthetic oligonucleotide
aactctgtaactgcctggaa

SEQ ID NO: 778 - DNA, 20 bp, Artificial sequence
  Synthetic oligonucleotide
aaactctgtaactgcctgga

SEQ ID NO: 779 - DNA, 20 bp, Artificial sequence
  Synthetic oligonucleotide
aaaactctgtaactgcctgg

SEQ ID NO: 780 - DNA, 20 bp, Artificial sequence
  Synthetic oligonucleotide
taaaactctgtaactgcctg

SEQ ID NO: 781 - DNA, 20 bp, Artificial sequence
  Synthetic oligonucleotide
ataaaactctgtaactgcct

SEQ ID NO: 782 - DNA, 20 bp, Artificial sequence
  Synthetic oligonucleotide
cataaaactctgtaactgcc

SEQ ID NO: 783 - DNA, 20 bp, Artificial sequence
  Synthetic oligonucleotide
gcataaaactctgtaactgc

SEQ ID NO: 784 - DNA, 20 bp, Artificial sequence
  Synthetic oligonucleotide
tgcataaaactctgtaactg

SEQ ID NO: 785 - DNA, 20 bp, Artificial sequence
  Synthetic oligonucleotide
ttgcataaaactctgtaact

SEQ ID NO: 786 - DNA, 20 bp, Artificial sequence
  Synthetic oligonucleotide
tttgcataaaactctgtaac

SEQ ID NO: 787 - DNA, 20 bp, Artificial sequence
  Synthetic oligonucleotide
ttttgcataaaactctgtaa

SEQ ID NO: 788 - DNA, 20 bp, Artificial sequence
  Synthetic oligonucleotide
cttttgcataaaactctgta

SEQ ID NO: 789 - DNA, 20 bp, Artificial sequence
  Synthetic oligonucleotide
tcttttgcataaaactctgt

SEQ ID NO: 790 - DNA, 20 bp, Artificial sequence
  Synthetic oligonucleotide
atcttttgcataaaactctg

SEQ ID NO: 791 - DNA, 20 bp, Artificial sequence
  Synthetic oligonucleotide
tatcttttgcataaaactct

SEQ ID NO: 792 - DNA, 20 bp, Artificial sequence
  Synthetic oligonucleotide
gtatcttttgcataaaactc

SEQ ID NO: 793 - DNA, 20 bp, Artificial sequence
  Synthetic oligonucleotide
tgtatcttttgcataaaact

SEQ ID NO: 794 - DNA, 20 bp, Artificial sequence
  Synthetic oligonucleotide
ctgtatcttttgcataaaac

SEQ ID NO: 795 - DNA, 20 bp, Artificial sequence
  Synthetic oligonucleotide
actgtatcttttgcataaaa

SEQ ID NO: 796 - DNA, 20 bp, Artificial sequence
  Synthetic oligonucleotide
aactgtatcttttgcataaa

SEQ ID NO: 797 - DNA, 20 bp, Artificial sequence
  Synthetic oligonucleotide
caactgtatcttttgcataa

SEQ ID NO: 798 - DNA, 20 bp, Artificial sequence
  Synthetic oligonucleotide
tcaactgtatcttttgcata

SEQ ID NO: 799 - DNA, 20 bp, Artificial sequence
  Synthetic oligonucleotide
gtcaactgtatcttttgcat

SEQ ID NO: 800 - DNA, 20 bp, Artificial sequence
  Synthetic oligonucleotide
tgtcaactgtatcttttgca

SEQ ID NO: 801 - DNA, 20 bp, Artificial sequence
  Synthetic oligonucleotide
atgtcaactgtatcttttgc

SEQ ID NO: 802 - DNA, 20 bp, Artificial sequence
  Synthetic oligonucleotide
gatgtcaactgtatcttttg

SEQ ID NO: 803 - DNA, 20 bp, Artificial sequence
  Synthetic oligonucleotide
tgatgtcaactgtatctttt

SEQ ID NO: 804 - DNA, 20 bp, Artificial sequence
  Synthetic oligonucleotide
ttgatgtcaactgtatcttt

SEQ ID NO: 805 - DNA, 20 bp, Artificial sequence
  Synthetic oligonucleotide
tttgatgtcaactgtatctt

SEQ ID NO: 806 - DNA, 20 bp, Artificial sequence
  Synthetic oligonucleotide
ctttgatgtcaactgtatct

SEQ ID NO: 807 - DNA, 20 bp, Artificial sequence
  Synthetic oligonucleotide
cctttgatgtcaactgtatc

SEQ ID NO: 808 - DNA, 20 bp, Artificial sequence
  Synthetic oligonucleotide
acctttgatgtcaactgtat

SEQ ID NO: 809 - DNA, 20 bp, Artificial sequence
  Synthetic oligonucleotide
aacctttgatgtcaactgta

SEQ ID NO: 810 - DNA, 20 bp, Artificial sequence
  Synthetic oligonucleotide
gaacctttgatgtcaactgt

SEQ ID NO: 811 - DNA, 20 bp, Artificial sequence
  Synthetic oligonucleotide
agaacctttgatgtcaactg

SEQ ID NO: 812 - DNA, 20 bp, Artificial sequence
  Synthetic oligonucleotide
gagaacctttgatgtcaact

SEQ ID NO: 813 - DNA, 20 bp, Artificial sequence
  Synthetic oligonucleotide
tgagaacctttgatgtcaac

SEQ ID NO: 814 - DNA, 20 bp, Artificial sequence
  Synthetic oligonucleotide
ttgagaacctttgatgtcaa

SEQ ID NO: 815 - DNA, 20 bp, Artificial sequence
  Synthetic oligonucleotide
tttgagaacctttgatgtca

SEQ ID NO: 816 - DNA, 20 bp, Artificial sequence
  Synthetic oligonucleotide
atttgagaacctttgatgtc

SEQ ID NO: 817 - DNA, 20 bp, Artificial sequence
  Synthetic oligonucleotide
aatttgagaacctttgatgt

SEQ ID NO: 818 - DNA, 20 bp, Artificial sequence
  Synthetic oligonucleotide
taatttgagaacctttgatg

SEQ ID NO: 819 - DNA, 20 bp, Artificial sequence
  Synthetic oligonucleotide
ataatttgagaacctttgat

SEQ ID NO: 820 - DNA, 20 bp, Artificial sequence
  Synthetic oligonucleotide
aataatttgagaacctttga

SEQ ID NO: 821 - DNA, 20 bp, Artificial sequence
  Synthetic oligonucleotide
aaataatttgagaacctttg

SEQ ID NO: 822 - DNA, 20 bp, Artificial sequence
  Synthetic oligonucleotide
gaaataatttgagaaccttt

SEQ ID NO: 823 - DNA, 20 bp, Artificial sequence
  Synthetic oligonucleotide
agaaataatttgagaacctt

SEQ ID NO: 824 - DNA, 20 bp, Artificial sequence
  Synthetic oligonucleotide
cagaaataatttgagaacct

SEQ ID NO: 825 - DNA, 20 bp, Artificial sequence
  Synthetic oligonucleotide
ccagaaataatttgagaacc

SEQ ID NO: 826 - DNA, 20 bp, Artificial sequence
  Synthetic oligonucleotide
gccagaaataatttgagaac

SEQ ID NO: 827 - DNA, 20 bp, Artificial sequence
  Synthetic oligonucleotide
tgccagaaataatttgagaa

SEQ ID NO: 828 - DNA, 20 bp, Artificial sequence
  Synthetic oligonucleotide
atgccagaaataatttgaga

SEQ ID NO: 829 - DNA, 20 bp, Artificial sequence
  Synthetic oligonucleotide
aatgccagaaataatttgag

SEQ ID NO: 830 - DNA, 20 bp, Artificial sequence
  Synthetic oligonucleotide
caatgccagaaataatttga

SEQ ID NO: 831 - DNA, 20 bp, Artificial sequence
  Synthetic oligonucleotide
acaatgccagaaataatttg

SEQ ID NO: 832 - DNA, 20 bp, Artificial sequence
  Synthetic oligonucleotide
aacaatgccagaaataattt

SEQ ID NO: 833 - DNA, 20 bp, Artificial sequence
  Synthetic oligonucleotide
taacaatgccagaaataatt

SEQ ID NO: 834 - DNA, 20 bp, Artificial sequence
  Synthetic oligonucleotide
ttaacaatgccagaaataat

SEQ ID NO: 835 - DNA, 20 bp, Artificial sequence
  Synthetic oligonucleotide
gttaacaatgccagaaataa

SEQ ID NO: 836 - DNA, 20 bp, Artificial sequence
  Synthetic oligonucleotide
agttaacaatgccagaaata

SEQ ID NO: 837 - DNA, 20 bp, Artificial sequence
  Synthetic oligonucleotide
aagttaacaatgccagaaat

SEQ ID NO: 838 - DNA, 20 bp, Artificial sequence
  Synthetic oligonucleotide
taagttaacaatgccagaaa

SEQ ID NO: 839 - DNA, 20 bp, Artificial sequence
  Synthetic oligonucleotide
ctaagttaacaatgccagaa

SEQ ID NO: 840 - DNA, 20 bp, Artificial sequence
  Synthetic oligonucleotide
tctaagttaacaatgccaga

SEQ ID NO: 841 - DNA, 20 bp, Artificial sequence
  Synthetic oligonucleotide
ctctaagttaacaatgccag

SEQ ID NO: 842 - DNA, 20 bp, Artificial sequence
  Synthetic oligonucleotide
tctctaagttaacaatgcca

SEQ ID NO: 843 - DNA, 20 bp, Artificial sequence
  Synthetic oligonucleotide
ttctctaagttaacaatgcc

SEQ ID NO: 844 - DNA, 20 bp, Artificial sequence
  Synthetic oligonucleotide
cttctctaagttaacaatgc

SEQ ID NO: 845 - DNA, 20 bp, Artificial sequence
  Synthetic oligonucleotide
gcttctctaagttaacaatg

SEQ ID NO: 846 - DNA, 20 bp, Artificial sequence
  Synthetic oligonucleotide
ggcttctctaagttaacaat

SEQ ID NO: 847 - DNA, 20 bp, Artificial sequence
  Synthetic oligonucleotide
aggcttctctaagttaacaa

SEQ ID NO: 848 - DNA, 20 bp, Artificial sequence
  Synthetic oligonucleotide
caggcttctctaagttaaca

SEQ ID NO: 849 - DNA, 20 bp, Artificial sequence
  Synthetic oligonucleotide
acaggcttctctaagttaac

SEQ ID NO: 850 - DNA, 20 bp, Artificial sequence
  Synthetic oligonucleotide
cacaggcttctctaagttaa

SEQ ID NO: 851 - DNA, 20 bp, Artificial sequence
  Synthetic oligonucleotide
tcacaggcttctctaagtta

SEQ ID NO: 852 - DNA, 20 bp, Artificial sequence
  Synthetic oligonucleotide
atcacaggcttctctaagtt

SEQ ID NO: 853 - DNA, 20 bp, Artificial sequence
  Synthetic oligonucleotide
aatcacaggcttctctaagt

SEQ ID NO: 854 - DNA, 20 bp, Artificial sequence
  Synthetic oligonucleotide
aaatcacaggcttctctaag

SEQ ID NO: 855 - DNA, 20 bp, Artificial sequence
  Synthetic oligonucleotide
caaatcacaggcttctctaa

SEQ ID NO: 856 - DNA, 20 bp, Artificial sequence
  Synthetic oligonucleotide
gcaaatcacaggcttctcta

SEQ ID NO: 857 - DNA, 20 bp, Artificial sequence
  Synthetic oligonucleotide
agcaaatcacaggcttctct

SEQ ID NO: 858 - DNA, 20 bp, Artificial sequence
  Synthetic oligonucleotide
gagcaaatcacaggcttctc

SEQ ID NO: 859 - DNA, 20 bp, Artificial sequence
  Synthetic oligonucleotide
agagcaaatcacaggcttct

SEQ ID NO: 860 - DNA, 20 bp, Artificial sequence
  Synthetic oligonucleotide
aagagcaaatcacaggcttc

SEQ ID NO: 861 - DNA, 20 bp, Artificial sequence
  Synthetic oligonucleotide
aaagagcaaatcacaggctt

SEQ ID NO: 862 - DNA, 20 bp, Artificial sequence
  Synthetic oligonucleotide
ccaaagagcaaatcacaggc

SEQ ID NO: 863 - DNA, 20 bp, Artificial sequence
  Synthetic oligonucleotide
gccaaagagcaaatcacagg

SEQ ID NO: 864 - DNA, 20 bp, Artificial sequence
  Synthetic oligonucleotide
agccaaagagcaaatcacag

SEQ ID NO: 865 - DNA, 20 bp, Artificial sequence
  Synthetic oligonucleotide
cagccaaagagcaaatcaca

SEQ ID NO: 866 - DNA, 20 bp, Artificial sequence
  Synthetic oligonucleotide
gcagccaaagagcaaatcac

SEQ ID NO: 867 - DNA, 20 bp, Artificial sequence
  Synthetic oligonucleotide
ggcagccaaagagcaaatca

SEQ ID NO: 868 - DNA, 20 bp, Artificial sequence
  Synthetic oligonucleotide
tggcagccaaagagcaaatc

SEQ ID NO: 869 - DNA, 20 bp, Artificial sequence
  Synthetic oligonucleotide
atggcagccaaagagcaaat

SEQ ID NO: 870 - DNA, 20 bp, Artificial sequence
  Synthetic oligonucleotide
gatggcagccaaagagcaaa

SEQ ID NO: 871 - DNA, 20 bp, Artificial sequence
  Synthetic oligonucleotide
tgatggcagccaaagagcaa

SEQ ID NO: 872 - DNA, 20 bp, Artificial sequence
  Synthetic oligonucleotide
atgatggcagccaaagagca

SEQ ID NO: 873 - DNA, 20 bp, Artificial sequence
  Synthetic oligonucleotide
tatgatggcagccaaagagc

SEQ ID NO: 874 - DNA, 20 bp, Artificial sequence
  Synthetic oligonucleotide
ttatgatggcagccaaagag

SEQ ID NO: 875 - DNA, 20 bp, Artificial sequence
  Synthetic oligonucleotide
tttatgatggcagccaaaga

SEQ ID NO: 876 - DNA, 20 bp, Artificial sequence
  Synthetic oligonucleotide
ttttatgatggcagccaaag

SEQ ID NO: 877 - DNA, 20 bp, Artificial sequence
  Synthetic oligonucleotide
attttatgatggcagccaaa

SEQ ID NO: 878 - DNA, 20 bp, Artificial sequence
  Synthetic oligonucleotide
tattttatgatggcagccaa

SEQ ID NO: 879 - DNA, 20 bp, Artificial sequence
  Synthetic oligonucleotide
ggtattttatgatggcagcc

SEQ ID NO: 880 - DNA, 20 bp, Artificial sequence
  Synthetic oligonucleotide
aggtattttatgatggcagc

SEQ ID NO: 881 - DNA, 20 bp, Artificial sequence
  Synthetic oligonucleotide
gaggtattttatgatggcag

SEQ ID NO: 882 - DNA, 20 bp, Artificial sequence
  Synthetic oligonucleotide
tgaggtattttatgatggca

SEQ ID NO: 883 - DNA, 20 bp, Artificial sequence
  Synthetic oligonucleotide
ttgaggtattttatgatggc

SEQ ID NO: 884 - DNA, 20 bp, Artificial sequence
  Synthetic oligonucleotide
tttgaggtattttatgatgg

SEQ ID NO: 885 - DNA, 20 bp, Artificial sequence
  Synthetic oligonucleotide
ctttgaggtattttatgatg

SEQ ID NO: 886 - DNA, 20 bp, Artificial sequence
  Synthetic oligonucleotide
tctttgaggtattttatgat

SEQ ID NO: 887 - DNA, 20 bp, Artificial sequence
  Synthetic oligonucleotide
ttctttgaggtattttatga

SEQ ID NO: 888 - DNA, 20 bp, Artificial sequence
  Synthetic oligonucleotide
attctttgaggtattttatg

SEQ ID NO: 889 - DNA, 20 bp, Artificial sequence
  Synthetic oligonucleotide
gaattctttgaggtatttta

SEQ ID NO: 890 - DNA, 20 bp, Artificial sequence
  Synthetic oligonucleotide
tgaattctttgaggtatttt

SEQ ID NO: 891 - DNA, 20 bp, Artificial sequence
  Synthetic oligonucleotide
ttgaattctttgaggtattt

SEQ ID NO: 892 - DNA, 20 bp, Artificial sequence
  Synthetic oligonucleotide
gttgaattctttgaggtatt

SEQ ID NO: 893 - DNA, 20 bp, Artificial sequence
  Synthetic oligonucleotide
agttgaattctttgaggtat

SEQ ID NO: 894 - DNA, 20 bp, Artificial sequence
  Synthetic oligonucleotide
aagttgaattctttgaggta

SEQ ID NO: 895 - DNA, 20 bp, Artificial sequence
  Synthetic oligonucleotide
caagttgaattctttgaggt

SEQ ID NO: 896 - DNA, 20 bp, Artificial sequence
  Synthetic oligonucleotide
ccaagttgaattctttgagg

SEQ ID NO: 897 - DNA, 20 bp, Artificial sequence
  Synthetic oligonucleotide
tccaagttgaattctttgag

SEQ ID NO: 898 - DNA, 20 bp, Artificial sequence
  Synthetic oligonucleotide
ttccaagttgaattctttga

SEQ ID NO: 899 - DNA, 20 bp, Artificial sequence
  Synthetic oligonucleotide
tttccaagttgaattctttg

SEQ ID NO: 900 - DNA, 20 bp, Artificial sequence
  Synthetic oligonucleotide
ttttccaagttgaattcttt

SEQ ID NO: 901 - DNA, 20 bp, Artificial sequence
  Synthetic oligonucleotide
cttttccaagttgaattctt

SEQ ID NO: 902 - DNA, 20 bp, Artificial sequence
  Synthetic oligonucleotide
tcttttccaagttgaattct

SEQ ID NO: 903 - DNA, 20 bp, Artificial sequence
  Synthetic oligonucleotide
atcttttccaagttgaattc

SEQ ID NO: 904 - DNA, 20 bp, Artificial sequence
  Synthetic oligonucleotide
catcttttccaagttgaatt

SEQ ID NO: 905 - DNA, 20 bp, Artificial sequence
  Synthetic oligonucleotide
gcatcttttccaagttgaat

SEQ ID NO: 906 - DNA, 20 bp, Artificial sequence
  Synthetic oligonucleotide
agcatcttttccaagttgaa

SEQ ID NO: 907 - DNA, 20 bp, Artificial sequence
  Synthetic oligonucleotide
gagcatcttttccaagttga

SEQ ID NO: 908 - DNA, 20 bp, Artificial sequence
  Synthetic oligonucleotide
tctcaggtttggagagcatc

SEQ ID NO: 909 - DNA, 20 bp, Artificial sequence
  Synthetic oligonucleotide
taaaattctcaggtttggag

SEQ ID NO: 910 - DNA, 20 bp, Artificial sequence
  Synthetic oligonucleotide
ttaaaattctcaggtttgga

SEQ ID NO: 911 - DNA, 20 bp, Artificial sequence
  Synthetic oligonucleotide
tttaaaattctcaggtttgg

SEQ ID NO: 912 - DNA, 20 bp, Artificial sequence
  Synthetic oligonucleotide
gtttaaaattctcaggtttg

SEQ ID NO: 913 - DNA, 20 bp, Artificial sequence
  Synthetic oligonucleotide
tgtttaaaattctcaggttt

SEQ ID NO: 914 - DNA, 20 bp, Artificial sequence
  Synthetic oligonucleotide
ctgtttaaaattctcaggtt

SEQ ID NO: 915 - DNA, 20 bp, Artificial sequence
  Synthetic oligonucleotide
gctgtttaaaattctcaggt

SEQ ID NO: 916 - DNA, 20 bp, Artificial sequence
  Synthetic oligonucleotide
agctgtttaaaattctcagg

SEQ ID NO: 917 - DNA, 20 bp, Artificial sequence
  Synthetic oligonucleotide
tagctgtttaaaattctcag

SEQ ID NO: 918 - DNA, 20 bp, Artificial sequence
  Synthetic oligonucleotide
atagctgtttaaaattctca

SEQ ID NO: 919 - DNA, 20 bp, Artificial sequence
  Synthetic oligonucleotide
gatagctgtttaaaattctc

SEQ ID NO: 920 - DNA, 20 bp, Artificial sequence
  Synthetic oligonucleotide
tgatagctgtttaaaattct

SEQ ID NO: 921 - DNA, 20 bp, Artificial sequence
  Synthetic oligonucleotide
ttgatagctgtttaaaattc

SEQ ID NO: 922 - DNA, 20 bp, Artificial sequence
  Synthetic oligonucleotide
cttgatagctgtttaaaatt

SEQ ID NO: 923 - DNA, 20 bp, Artificial sequence
  Synthetic oligonucleotide
acttgatagctgtttaaaat

SEQ ID NO: 924 - DNA, 20 bp, Artificial sequence
  Synthetic oligonucleotide
tacttgatagctgtttaaaa

SEQ ID NO: 925 - DNA, 20 bp, Artificial sequence
  Synthetic oligonucleotide
ttacttgatagctgtttaaa

SEQ ID NO: 926 - DNA, 20 bp, Artificial sequence
  Synthetic oligonucleotide
tttacttgatagctgtttaa

SEQ ID NO: 927 - DNA, 20 bp, Artificial sequence
  Synthetic oligonucleotide
ttttacttgatagctgttta

SEQ ID NO: 928 - DNA, 20 bp, Artificial sequence
  Synthetic oligonucleotide
attttacttgatagctgttt

SEQ ID NO: 929 - DNA, 20 bp, Artificial sequence
  Synthetic oligonucleotide
cattttacttgatagctgtt

SEQ ID NO: 930 - DNA, 20 bp, Artificial sequence
  Synthetic oligonucleotide
ccattttacttgatagctgt

SEQ ID NO: 931 - DNA, 20 bp, Artificial sequence
  Synthetic oligonucleotide
tccattttacttgatagctg

SEQ ID NO: 932 - DNA, 20 bp, Artificial sequence
  Synthetic oligonucleotide
ttccattttacttgatagct

SEQ ID NO: 933 - DNA, 20 bp, Artificial sequence
  Synthetic oligonucleotide
attccattttacttgatagc

SEQ ID NO: 934 - DNA, 20 bp, Artificial sequence
  Synthetic oligonucleotide
aattccattttacttgatag

SEQ ID NO: 935 - DNA, 20 bp, Artificial sequence
  Synthetic oligonucleotide
cataaattccattttacttg

SEQ ID NO: 936 - DNA, 20 bp, Artificial sequence
  Synthetic oligonucleotide
gtcataaattccattttact

SEQ ID NO: 937 - DNA, 20 bp, Artificial sequence
  Synthetic oligonucleotide
tgtcataaattccattttac

SEQ ID NO: 938 - DNA, 20 bp, Artificial sequence
  Synthetic oligonucleotide
cattaattgtcataaattcc

SEQ ID NO: 939 - DNA, 20 bp, Artificial sequence
  Synthetic oligonucleotide
ccattaattgtcataaattc

SEQ ID NO: 940 - DNA, 20 bp, Artificial sequence
  Synthetic oligonucleotide
gttccattaattgtcataaa

SEQ ID NO: 941 - DNA, 20 bp, Artificial sequence
  Synthetic oligonucleotide
tgttccattaattgtcataa

SEQ ID NO: 942 - DNA, 20 bp, Artificial sequence
  Synthetic oligonucleotide
ttgttccattaattgtcata

SEQ ID NO: 943 - DNA, 20 bp, Artificial sequence
  Synthetic oligonucleotide
gttgttccattaattgtcat

SEQ ID NO: 944 - DNA, 20 bp, Artificial sequence
  Synthetic oligonucleotide
tgttgttccattaattgtca

SEQ ID NO: 945 - DNA, 20 bp, Artificial sequence
  Synthetic oligonucleotide
atgttgttccattaattgtc

SEQ ID NO: 946 - DNA, 20 bp, Artificial sequence
  Synthetic oligonucleotide
aatgttgttccattaattgt

SEQ ID NO: 947 - DNA, 20 bp, Artificial sequence
  Synthetic oligonucleotide
taatgttgttccattaattg

SEQ ID NO: 948 - DNA, 20 bp, Artificial sequence
  Synthetic oligonucleotide
tccttaatgttgttccatta

SEQ ID NO: 949 - DNA, 20 bp, Artificial sequence
  Synthetic oligonucleotide
attccttaatgttgttccat

SEQ ID NO: 950 - DNA, 20 bp, Artificial sequence
  Synthetic oligonucleotide
gattccttaatgttgttcca

SEQ ID NO: 951 - DNA, 20 bp, Artificial sequence
  Synthetic oligonucleotide
agattccttaatgttgttcc

SEQ ID NO: 952 - DNA, 20 bp, Artificial sequence
  Synthetic oligonucleotide
cagattccttaatgttgttc

SEQ ID NO: 953 - DNA, 20 bp, Artificial sequence
  Synthetic oligonucleotide
ccagattccttaatgttgtt

SEQ ID NO: 954 - DNA, 20 bp, Artificial sequence
  Synthetic oligonucleotide
tccagattccttaatgttgt

SEQ ID NO: 955 - DNA, 20 bp, Artificial sequence
  Synthetic oligonucleotide
ttccagattccttaatgttg

SEQ ID NO: 956 - DNA, 20 bp, Artificial sequence
  Synthetic oligonucleotide
tttccagattccttaatgtt

SEQ ID NO: 957 - DNA, 20 bp, Artificial sequence
  Synthetic oligonucleotide
atttccagattccttaatgt

SEQ ID NO: 958 - DNA, 20 bp, Artificial sequence
  Synthetic oligonucleotide
gatttccagattccttaatg

SEQ ID NO: 959 - DNA, 20 bp, Artificial sequence
  Synthetic oligonucleotide
ggatttccagattccttaat

SEQ ID NO: 960 - DNA, 20 bp, Artificial sequence
  Synthetic oligonucleotide
aggatttccagattccttaa

SEQ ID NO: 961 - DNA, 20 bp, Artificial sequence
  Synthetic oligonucleotide
taggatttccagattcctta

SEQ ID NO: 962 - DNA, 20 bp, Artificial sequence
  Synthetic oligonucleotide
gtaggatttccagattcctt

SEQ ID NO: 963 - DNA, 20 bp, Artificial sequence
  Synthetic oligonucleotide
tctgattctgtaggatttcc

SEQ ID NO: 964 - DNA, 20 bp, Artificial sequence
  Synthetic oligonucleotide
gtctgattctgtaggatttc

SEQ ID NO: 965 - DNA, 20 bp, Artificial sequence
  Synthetic oligonucleotide
agtctgattctgtaggattt

SEQ ID NO: 966 - DNA, 20 bp, Artificial sequence
  Synthetic oligonucleotide
cagtctgattctgtaggatt

SEQ ID NO: 967 - DNA, 20 bp, Artificial sequence
  Synthetic oligonucleotide
tcagtctgattctgtaggat

SEQ ID NO: 968 - DNA, 20 bp, Artificial sequence
  Synthetic oligonucleotide
atcagtctgattctgtagga

SEQ ID NO: 969 - DNA, 20 bp, Artificial sequence
  Synthetic oligonucleotide
tatcagtctgattctgtagg

SEQ ID NO: 970 - DNA, 20 bp, Artificial sequence
  Synthetic oligonucleotide
atatcagtctgattctgtag

SEQ ID NO: 971 - DNA, 20 bp, Artificial sequence
  Synthetic oligonucleotide
catatcagtctgattctgta

SEQ ID NO: 972 - DNA, 20 bp, Artificial sequence
  Synthetic oligonucleotide
tcatatcagtctgattctgt

SEQ ID NO: 973 - DNA, 20 bp, Artificial sequence
  Synthetic oligonucleotide
ttcatatcagtctgattctg

SEQ ID NO: 974 - DNA, 20 bp, Artificial sequence
  Synthetic oligonucleotide
tttcatatcagtctgattct

SEQ ID NO: 975 - DNA, 20 bp, Artificial sequence
  Synthetic oligonucleotide
ttttcatatcagtctgattc

SEQ ID NO: 976 - DNA, 20 bp, Artificial sequence
  Synthetic oligonucleotide
gttttcatatcagtctgatt

SEQ ID NO: 977 - DNA, 20 bp, Artificial sequence
  Synthetic oligonucleotide
tggttttcatatcagtctga

SEQ ID NO: 978 - DNA, 20 bp, Artificial sequence
  Synthetic oligonucleotide
ttggttttcatatcagtctg

SEQ ID NO: 979 - DNA, 20 bp, Artificial sequence
  Synthetic oligonucleotide
tttggttttcatatcagtct

SEQ ID NO: 980 - DNA, 20 bp, Artificial sequence
  Synthetic oligonucleotide
ctttggttttcatatcagtc

SEQ ID NO: 981 - DNA, 20 bp, Artificial sequence
  Synthetic oligonucleotide
cctttggttttcatatcagt

SEQ ID NO: 982 - DNA, 20 bp, Artificial sequence
  Synthetic oligonucleotide
tcctttggttttcatatcag

SEQ ID NO: 983 - DNA, 20 bp, Artificial sequence
  Synthetic oligonucleotide
ttcctttggttttcatatca

SEQ ID NO: 984 - DNA, 20 bp, Artificial sequence
  Synthetic oligonucleotide
cttcctttggttttcatatc

SEQ ID NO: 985 - DNA, 20 bp, Artificial sequence
  Synthetic oligonucleotide
acttcctttggttttcatat

SEQ ID NO: 986 - DNA, 20 bp, Artificial sequence
  Synthetic oligonucleotide
aacttcctttggttttcata

SEQ ID NO: 987 - DNA, 20 bp, Artificial sequence
  Synthetic oligonucleotide
aaacttcctttggttttcat

SEQ ID NO: 988 - DNA, 20 bp, Artificial sequence
  Synthetic oligonucleotide
caaacttcctttggttttca

SEQ ID NO: 989 - DNA, 20 bp, Artificial sequence
  Synthetic oligonucleotide
acccacagcaaacttccttt

SEQ ID NO: 990 - DNA, 20 bp, Artificial sequence
  Synthetic oligonucleotide
aacccacagcaaacttcctt

SEQ ID NO: 991 - DNA, 20 bp, Artificial sequence
  Synthetic oligonucleotide
aaacccacagcaaacttcct

SEQ ID NO: 992 - DNA, 20 bp, Artificial sequence
  Synthetic oligonucleotide
aaaacccacagcaaacttcc

SEQ ID NO: 993 - DNA, 20 bp, Artificial sequence
  Synthetic oligonucleotide
taaaacccacagcaaacttc

SEQ ID NO: 994 - DNA, 20 bp, Artificial sequence
  Synthetic oligonucleotide
ctaaaacccacagcaaactt

SEQ ID NO: 995 - DNA, 20 bp, Artificial sequence
  Synthetic oligonucleotide
tctaaaacccacagcaaact

SEQ ID NO: 996 - DNA, 20 bp, Artificial sequence
  Synthetic oligonucleotide
gtctaaaacccacagcaaac

SEQ ID NO: 997 - DNA, 20 bp, Artificial sequence
  Synthetic oligonucleotide
aagttttagtgtggtctaaa

SEQ ID NO: 998 - DNA, 20 bp, Artificial sequence
  Synthetic oligonucleotide
gaagttttagtgtggtctaa

SEQ ID NO: 999 - DNA, 20 bp, Artificial sequence
  Synthetic oligonucleotide
tgaagttttagtgtggtcta

SEQ ID NO: 1000 - DNA, 20 bp, Artificial sequence
  Synthetic oligonucleotide
atgaagttttagtgtggtct

SEQ ID NO: 1001 - DNA, 20 bp, Artificial sequence
  Synthetic oligonucleotide
aatgaagttttagtgtggtc

SEQ ID NO: 1002 - DNA, 20 bp, Artificial sequence
  Synthetic oligonucleotide
aaatgaagttttagtgtggt

SEQ ID NO: 1003 - DNA, 20 bp, Artificial sequence
  Synthetic oligonucleotide
caaatgaagttttagtgtgg

SEQ ID NO: 1004 - DNA, 20 bp, Artificial sequence
  Synthetic oligonucleotide
ccaaatgaagttttagtgtg

SEQ ID NO: 1005 - DNA, 20 bp, Artificial sequence
  Synthetic oligonucleotide
cccaaatgaagttttagtgt

SEQ ID NO: 1006 - DNA, 20 bp, Artificial sequence
  Synthetic oligonucleotide
tcccaaatgaagttttagtg

SEQ ID NO: 1007 - DNA, 20 bp, Artificial sequence
  Synthetic oligonucleotide
ctcccaaatgaagttttagt

SEQ ID NO: 1008 - DNA, 20 bp, Artificial sequence
  Synthetic oligonucleotide
tctcccaaatgaagttttag

SEQ ID NO: 1009 - DNA, 20 bp, Artificial sequence
  Synthetic oligonucleotide
gtctcccaaatgaagtttta

SEQ ID NO: 1010 - DNA, 20 bp, Artificial sequence
  Synthetic oligonucleotide
cgtctcccaaatgaagtttt

SEQ ID NO: 1011 - DNA, 20 bp, Artificial sequence
  Synthetic oligonucleotide
ccgtctcccaaatgaagttt

SEQ ID NO: 1012 - DNA, 20 bp, Artificial sequence
  Synthetic oligonucleotide
tccgtctcccaaatgaagtt

SEQ ID NO: 1013 - DNA, 20 bp, Artificial sequence
  Synthetic oligonucleotide
ttccgtctcccaaatgaagt

SEQ ID NO: 1014 - DNA, 20 bp, Artificial sequence
  Synthetic oligonucleotide
cttccgtctcccaaatgaag

SEQ ID NO: 1015 - DNA, 20 bp, Artificial sequence
  Synthetic oligonucleotide
acttccgtctcccaaatgaa

SEQ ID NO: 1016 - DNA, 20 bp, Artificial sequence
  Synthetic oligonucleotide
aacttccgtctcccaaatga

SEQ ID NO: 1017 - DNA, 20 bp, Artificial sequence
  Synthetic oligonucleotide
taacttccgtctcccaaatg

SEQ ID NO: 1018 - DNA, 20 bp, Artificial sequence
  Synthetic oligonucleotide
ttaacttccgtctcccaaat

SEQ ID NO: 1019 - DNA, 20 bp, Artificial sequence
  Synthetic oligonucleotide
tttaacttccgtctcccaaa

SEQ ID NO: 1020 - DNA, 20 bp, Artificial sequence
  Synthetic oligonucleotide
ctttaacttccgtctcccaa

SEQ ID NO: 1021 - DNA, 20 bp, Artificial sequence
  Synthetic oligonucleotide
tctttaacttccgtctccca

SEQ ID NO: 1022 - DNA, 20 bp, Artificial sequence
  Synthetic oligonucleotide
ttctttaacttccgtctccc

SEQ ID NO: 1023 - DNA, 20 bp, Artificial sequence
  Synthetic oligonucleotide
cttctttaacttccgtctcc

SEQ ID NO: 1024 - DNA, 20 bp, Artificial sequence
  Synthetic oligonucleotide
acttctttaacttccgtctc

SEQ ID NO: 1025 - DNA, 20 bp, Artificial sequence
  Synthetic oligonucleotide
cacttctttaacttccgtct

SEQ ID NO: 1026 - DNA, 20 bp, Artificial sequence
  Synthetic oligonucleotide
ccacttctttaacttccgtc

SEQ ID NO: 1027 - DNA, 20 bp, Artificial sequence
  Synthetic oligonucleotide
cccacttctttaacttccgt

SEQ ID NO: 1028 - DNA, 20 bp, Artificial sequence
  Synthetic oligonucleotide
acccacttctttaacttccg

SEQ ID NO: 1029 - DNA, 20 bp, Artificial sequence
  Synthetic oligonucleotide
cacccacttctttaacttcc

SEQ ID NO: 1030 - DNA, 20 bp, Artificial sequence
  Synthetic oligonucleotide
tcacccacttctttaacttc

SEQ ID NO: 1031 - DNA, 20 bp, Artificial sequence
  Synthetic oligonucleotide
gtcacccacttctttaactt

SEQ ID NO: 1032 - DNA, 20 bp, Artificial sequence
  Synthetic oligonucleotide
ggtcacccacttctttaact

SEQ ID NO: 1033 - DNA, 20 bp, Artificial sequence
  Synthetic oligonucleotide
ttaaggagtggctgggtcac

SEQ ID NO: 1034 - DNA, 20 bp, Artificial sequence
  Synthetic oligonucleotide
tttaaggagtggctgggtca

SEQ ID NO: 1035 - DNA, 20 bp, Artificial sequence
  Synthetic oligonucleotide
atttaaggagtggctgggtc

SEQ ID NO: 1036 - DNA, 20 bp, Artificial sequence
  Synthetic oligonucleotide
aatttaaggagtggctgggt

SEQ ID NO: 1037 - DNA, 20 bp, Artificial sequence
  Synthetic oligonucleotide
taatttaaggagtggctggg

SEQ ID NO: 1038 - DNA, 20 bp, Artificial sequence
  Synthetic oligonucleotide
ttaatttaaggagtggctgg

SEQ ID NO: 1039 - DNA, 20 bp, Artificial sequence
  Synthetic oligonucleotide
cttaatttaaggagtggctg

SEQ ID NO: 1040 - DNA, 20 bp, Artificial sequence
  Synthetic oligonucleotide
gcatttatttcccttaattt

SEQ ID NO: 1041 - DNA, 20 bp, Artificial sequence
  Synthetic oligonucleotide
ggcatttatttcccttaatt

SEQ ID NO: 1042 - DNA, 20 bp, Artificial sequence
  Synthetic oligonucleotide
gggcatttatttcccttaat

SEQ ID NO: 1043 - DNA, 20 bp, Artificial sequence
  Synthetic oligonucleotide
cgggcatttatttcccttaa

SEQ ID NO: 1044 - DNA, 20 bp, Artificial sequence
  Synthetic oligonucleotide
ccgggcatttatttccctta

SEQ ID NO: 1045 - DNA, 20 bp, Artificial sequence
  Synthetic oligonucleotide
gccgggcatttatttccctt

SEQ ID NO: 1046 - DNA, 20 bp, Artificial sequence
  Synthetic oligonucleotide
agccgggcatttatttccct

SEQ ID NO: 1047 - DNA, 20 bp, Artificial sequence
  Synthetic oligonucleotide
caagccgggcatttatttcc

SEQ ID NO: 1048 - DNA, 20 bp, Artificial sequence
  Synthetic oligonucleotide
tcaagccgggcatttatttc

SEQ ID NO: 1049 - DNA, 20 bp, Artificial sequence
  Synthetic oligonucleotide
atcaagccgggcatttattt

SEQ ID NO: 1050 - DNA, 20 bp, Artificial sequence
  Synthetic oligonucleotide
catcaagccgggcatttatt

SEQ ID NO: 1051 - DNA, 20 bp, Artificial sequence
  Synthetic oligonucleotide
gcatcaagccgggcatttat

SEQ ID NO: 1052 - DNA, 20 bp, Artificial sequence
  Synthetic oligonucleotide
acttccgatacagcatcaag

SEQ ID NO: 1053 - DNA, 20 bp, Artificial sequence
  Synthetic oligonucleotide
aacttccgatacagcatcaa

SEQ ID NO: 1054 - DNA, 20 bp, Artificial sequence
  Synthetic oligonucleotide
gaacttccgatacagcatca

SEQ ID NO: 1055 - DNA, 20 bp, Artificial sequence
  Synthetic oligonucleotide
agaacttccgatacagcatc

SEQ ID NO: 1056 - DNA, 20 bp, Artificial sequence
  Synthetic oligonucleotide
gagaacttccgatacagcat

SEQ ID NO: 1057 - DNA, 20 bp, Artificial sequence
  Synthetic oligonucleotide
ggagaacttccgatacagca

SEQ ID NO: 1058 - DNA, 20 bp, Artificial sequence
  Synthetic oligonucleotide
gattctgaatggagaacttc

SEQ ID NO: 1059 - DNA, 20 bp, Artificial sequence
  Synthetic oligonucleotide
agattctgaatggagaactt

SEQ ID NO: 1060 - DNA, 20 bp, Artificial sequence
  Synthetic oligonucleotide
tagattctgaatggagaact

SEQ ID NO: 1061 - DNA, 20 bp, Artificial sequence
  Synthetic oligonucleotide
ctagattctgaatggagaac

SEQ ID NO: 1062 - DNA, 20 bp, Artificial sequence
  Synthetic oligonucleotide
actagattctgaatggagaa

SEQ ID NO: 1063 - DNA, 20 bp, Artificial sequence
  Synthetic oligonucleotide
cactagattctgaatggaga

SEQ ID NO: 1064 - DNA, 20 bp, Artificial sequence
  Synthetic oligonucleotide
acactagattctgaatggag

SEQ ID NO: 1065 - DNA, 20 bp, Artificial sequence
  Synthetic oligonucleotide
cacactagattctgaatgga

SEQ ID NO: 1066 - DNA, 20 bp, Artificial sequence
  Synthetic oligonucleotide
acacactagattctgaatgg

SEQ ID NO: 1067 - DNA, 20 bp, Artificial sequence
  Synthetic oligonucleotide
aacacactagattctgaatg

SEQ ID NO: 1068 - DNA, 20 bp, Artificial sequence
  Synthetic oligonucleotide
aaacacactagattctgaat

SEQ ID NO: 1069 - DNA, 20 bp, Artificial sequence
  Synthetic oligonucleotide
caaacacactagattctgaa

SEQ ID NO: 1070 - DNA, 20 bp, Artificial sequence
  Synthetic oligonucleotide
ccaaacacactagattctga

SEQ ID NO: 1071 - DNA, 20 bp, Artificial sequence
  Synthetic oligonucleotide
accaaacacactagattctg

SEQ ID NO: 1072 - DNA, 20 bp, Artificial sequence
  Synthetic oligonucleotide
gaccaaacacactagattct

SEQ ID NO: 1073 - DNA, 20 bp, Artificial sequence
  Synthetic oligonucleotide
tgaccaaacacactagattc

SEQ ID NO: 1074 - DNA, 20 bp, Artificial sequence
  Synthetic oligonucleotide
ctgaccaaacacactagatt

SEQ ID NO: 1075 - DNA, 20 bp, Artificial sequence
  Synthetic oligonucleotide
tctgaccaaacacactagat

SEQ ID NO: 1076 - DNA, 20 bp, Artificial sequence
  Synthetic oligonucleotide
atctgaccaaacacactaga

SEQ ID NO: 1077 - DNA, 20 bp, Artificial sequence
  Synthetic oligonucleotide
tatctgaccaaacacactag

SEQ ID NO: 1078 - DNA, 20 bp, Artificial sequence
  Synthetic oligonucleotide
ctatctgaccaaacacacta

SEQ ID NO: 1079 - DNA, 20 bp, Artificial sequence
  Synthetic oligonucleotide
tctatctgaccaaacacact

SEQ ID NO: 1080 - DNA, 20 bp, Artificial sequence
  Synthetic oligonucleotide
ttctatctgaccaaacacac

SEQ ID NO: 1081 - DNA, 20 bp, Artificial sequence
  Synthetic oligonucleotide
tttctatctgaccaaacaca

SEQ ID NO: 1082 - DNA, 20 bp, Artificial sequence
  Synthetic oligonucleotide
ttttctatctgaccaaacac

SEQ ID NO: 1083 - DNA, 20 bp, Artificial sequence
  Synthetic oligonucleotide
attttctatctgaccaaaca

SEQ ID NO: 1084 - DNA, 20 bp, Artificial sequence
  Synthetic oligonucleotide
gattttctatctgaccaaac

SEQ ID NO: 1085 - DNA, 20 bp, Artificial sequence
  Synthetic oligonucleotide
tgattttctatctgaccaaa

SEQ ID NO: 1086 - DNA, 20 bp, Artificial sequence
  Synthetic oligonucleotide
atgattttctatctgaccaa

SEQ ID NO: 1087 - DNA, 20 bp, Artificial sequence
  Synthetic oligonucleotide
gatgattttctatctgacca

SEQ ID NO: 1088 - DNA, 20 bp, Artificial sequence
  Synthetic oligonucleotide
agatgattttctatctgacc

SEQ ID NO: 1089 - DNA, 20 bp, Artificial sequence
  Synthetic oligonucleotide
tagatgattttctatctgac

SEQ ID NO: 1090 - DNA, 20 bp, Artificial sequence
  Synthetic oligonucleotide
gtagatgattttctatctga

SEQ ID NO: 1091 - DNA, 20 bp, Artificial sequence
  Synthetic oligonucleotide
cgtagatgattttctatctg

SEQ ID NO: 1092 - DNA, 20 bp, Artificial sequence
  Synthetic oligonucleotide
acgtagatgattttctatct

SEQ ID NO: 1093 - DNA, 20 bp, Artificial sequence
  Synthetic oligonucleotide
tacgtagatgattttctatc

SEQ ID NO: 1094 - DNA, 20 bp, Artificial sequence
  Synthetic oligonucleotide
ttacgtagatgattttctat

SEQ ID NO: 1095 - DNA, 20 bp, Artificial sequence
  Synthetic oligonucleotide
tttacgtagatgattttcta

SEQ ID NO: 1096 - DNA, 20 bp, Artificial sequence
  Synthetic oligonucleotide
atttacgtagatgattttct

SEQ ID NO: 1097 - DNA, 20 bp, Artificial sequence
  Synthetic oligonucleotide
aatttacgtagatgattttc

SEQ ID NO: 1098 - DNA, 20 bp, Artificial sequence
  Synthetic oligonucleotide
caatttacgtagatgatttt

SEQ ID NO: 1099 - DNA, 20 bp, Artificial sequence
  Synthetic oligonucleotide
gcaatttacgtagatgattt

SEQ ID NO: 1100 - DNA, 20 bp, Artificial sequence
  Synthetic oligonucleotide
ggcaatttacgtagatgatt

SEQ ID NO: 1101 - DNA, 20 bp, Artificial sequence
  Synthetic oligonucleotide
gggcaatttacgtagatgat

SEQ ID NO: 1102 - DNA, 20 bp, Artificial sequence
  Synthetic oligonucleotide
cgggcaatttacgtagatga

SEQ ID NO: 1103 - DNA, 20 bp, Artificial sequence
  Synthetic oligonucleotide
tcgggcaatttacgtagatg

SEQ ID NO: 1104 - DNA, 20 bp, Artificial sequence
  Synthetic oligonucleotide
gtcgggcaatttacgtagat

SEQ ID NO: 1105 - DNA, 20 bp, Artificial sequence
  Synthetic oligonucleotide
tgtcgggcaatttacgtaga

SEQ ID NO: 1106 - DNA, 20 bp, Artificial sequence
  Synthetic oligonucleotide
atgtcgggcaatttacgtag

SEQ ID NO: 1107 - DNA, 20 bp, Artificial sequence
  Synthetic oligonucleotide
tatgtcgggcaatttacgta

SEQ ID NO: 1108 - DNA, 20 bp, Artificial sequence
  Synthetic oligonucleotide
ctatgtcgggcaatttacgt

SEQ ID NO: 1109 - DNA, 20 bp, Artificial sequence
  Synthetic oligonucleotide
tctatgtcgggcaatttacg

SEQ ID NO: 1110 - DNA, 20 bp, Artificial sequence
  Synthetic oligonucleotide
ctctatgtcgggcaatttac

SEQ ID NO: 1111 - DNA, 20 bp, Artificial sequence
  Synthetic oligonucleotide
tctctatgtcgggcaattta

SEQ ID NO: 1112 - DNA, 20 bp, Artificial sequence
  Synthetic oligonucleotide
ctctctatgtcgggcaattt

SEQ ID NO: 1113 - DNA, 20 bp, Artificial sequence
  Synthetic oligonucleotide
cctctctatgtcgggcaatt

SEQ ID NO: 1114 - DNA, 20 bp, Artificial sequence
  Synthetic oligonucleotide
ccctctctatgtcgggcaat

SEQ ID NO: 1115 - DNA, 20 bp, Artificial sequence
  Synthetic oligonucleotide
taaatgctacagagtcccct

SEQ ID NO: 1116 - DNA, 20 bp, Artificial sequence
  Synthetic oligonucleotide
ataaatgctacagagtcccc

SEQ ID NO: 1117 - DNA, 20 bp, Artificial sequence
  Synthetic oligonucleotide
gataaatgctacagagtccc

SEQ ID NO: 1118 - DNA, 20 bp, Artificial sequence
  Synthetic oligonucleotide
tgataaatgctacagagtcc

SEQ ID NO: 1119 - DNA, 20 bp, Artificial sequence
  Synthetic oligonucleotide
gtgataaatgctacagagtc

SEQ ID NO: 1120 - DNA, 20 bp, Artificial sequence
  Synthetic oligonucleotide
tgtgataaatgctacagagt

SEQ ID NO: 1121 - DNA, 20 bp, Artificial sequence
  Synthetic oligonucleotide
ttgtgataaatgctacagag

SEQ ID NO: 1122 - DNA, 20 bp, Artificial sequence
  Synthetic oligonucleotide
tttgtgataaatgctacaga

SEQ ID NO: 1123 - DNA, 20 bp, Artificial sequence
  Synthetic oligonucleotide
ttttgtgataaatgctacag

SEQ ID NO: 1124 - DNA, 20 bp, Artificial sequence
  Synthetic oligonucleotide
tttttgtgataaatgctaca

SEQ ID NO: 1125 - DNA, 20 bp, Artificial sequence
  Synthetic oligonucleotide
ctcttgggtagaacattttt

SEQ ID NO: 1126 - DNA, 20 bp, Artificial sequence
  Synthetic oligonucleotide
actcttgggtagaacatttt

SEQ ID NO: 1127 - DNA, 20 bp, Artificial sequence
  Synthetic oligonucleotide
aactcttgggtagaacattt

SEQ ID NO: 1128 - DNA, 20 bp, Artificial sequence
  Synthetic oligonucleotide
gaactcttgggtagaacatt

SEQ ID NO: 1129 - DNA, 20 bp, Artificial sequence
  Synthetic oligonucleotide
agaactcttgggtagaacat

SEQ ID NO: 1130 - DNA, 20 bp, Artificial sequence
  Synthetic oligonucleotide
aagaactcttgggtagaaca

SEQ ID NO: 1131 - DNA, 20 bp, Artificial sequence
  Synthetic oligonucleotide
gaagaactcttgggtagaac

SEQ ID NO: 1132 - DNA, 20 bp, Artificial sequence
  Synthetic oligonucleotide
agaagaactcttgggtagaa

SEQ ID NO: 1133 - DNA, 20 bp, Artificial sequence
  Synthetic oligonucleotide
tgacaatcaagaagaactct

SEQ ID NO: 1134 - DNA, 20 bp, Artificial sequence
  Synthetic oligonucleotide
ttgacaatcaagaagaactc

SEQ ID NO: 1135 - DNA, 20 bp, Artificial sequence
  Synthetic oligonucleotide
tttgacaatcaagaagaact

SEQ ID NO: 1136 - DNA, 20 bp, Artificial sequence
  Synthetic oligonucleotide
ttttgacaatcaagaagaac

SEQ ID NO: 1137 - DNA, 20 bp, Artificial sequence
  Synthetic oligonucleotide
gttttgacaatcaagaagaa

SEQ ID NO: 1138 - DNA, 20 bp, Artificial sequence
  Synthetic oligonucleotide
agttttgacaatcaagaaga

SEQ ID NO: 1139 - DNA, 20 bp, Artificial sequence
  Synthetic oligonucleotide
aagttttgacaatcaagaag

SEQ ID NO: 1140 - DNA, 20 bp, Artificial sequence
  Synthetic oligonucleotide
aaagttttgacaatcaagaa

SEQ ID NO: 1141 - DNA, 20 bp, Artificial sequence
  Synthetic oligonucleotide
taaagttttgacaatcaaga

SEQ ID NO: 1142 - DNA, 20 bp, Artificial sequence
  Synthetic oligonucleotide
ataaagttttgacaatcaag

SEQ ID NO: 1143 - DNA, 20 bp, Artificial sequence
  Synthetic oligonucleotide
gatataaagttttgacaatc

SEQ ID NO: 1144 - DNA, 20 bp, Artificial sequence
  Synthetic oligonucleotide
gtgatataaagttttgacaa

SEQ ID NO: 1145 - DNA, 20 bp, Artificial sequence
  Synthetic oligonucleotide
ggtgatataaagttttgaca

SEQ ID NO: 1146 - DNA, 20 bp, Artificial sequence
  Synthetic oligonucleotide
aggtgatataaagttttgac

SEQ ID NO: 1147 - DNA, 20 bp, Artificial sequence
  Synthetic oligonucleotide
taggtgatataaagttttga

SEQ ID NO: 1148 - DNA, 20 bp, Artificial sequence
  Synthetic oligonucleotide
ttaggtgatataaagttttg

SEQ ID NO: 1149 - DNA, 20 bp, Artificial sequence
  Synthetic oligonucleotide
ctttaggtgatataaagttt

SEQ ID NO: 1150 - DNA, 20 bp, Artificial sequence
  Synthetic oligonucleotide
ctgactttaggtgatataaa

SEQ ID NO: 1151 - DNA, 20 bp, Artificial sequence
  Synthetic oligonucleotide
tctgactttaggtgatataa

SEQ ID NO: 1152 - DNA, 20 bp, Artificial sequence
  Synthetic oligonucleotide
ttctgactttaggtgatata

SEQ ID NO: 1153 - DNA, 20 bp, Artificial sequence
  Synthetic oligonucleotide
attctgactttaggtgatat

SEQ ID NO: 1154 - DNA, 20 bp, Artificial sequence
  Synthetic oligonucleotide
aattctgactttaggtgata

SEQ ID NO: 1155 - DNA, 20 bp, Artificial sequence
  Synthetic oligonucleotide
aaattctgactttaggtgat

SEQ ID NO: 1156 - DNA, 20 bp, Artificial sequence
  Synthetic oligonucleotide
gaaattctgactttaggtga

SEQ ID NO: 1157 - DNA, 20 bp, Artificial sequence
  Synthetic oligonucleotide
tgaaattctgactttaggtg

SEQ ID NO: 1158 - DNA, 20 bp, Artificial sequence
  Synthetic oligonucleotide
ttgaaattctgactttaggt

SEQ ID NO: 1159 - DNA, 20 bp, Artificial sequence
  Synthetic oligonucleotide
cttgaaattctgactttagg

SEQ ID NO: 1160 - DNA, 20 bp, Artificial sequence
  Synthetic oligonucleotide
gcttgaaattctgactttag

SEQ ID NO: 1161 - DNA, 20 bp, Artificial sequence
  Synthetic oligonucleotide
tgcttgaaattctgacttta

SEQ ID NO: 1162 - DNA, 20 bp, Artificial sequence
  Synthetic oligonucleotide
ttgcttgaaattctgacttt

SEQ ID NO: 1163 - DNA, 20 bp, Artificial sequence
  Synthetic oligonucleotide
attgcttgaaattctgactt

SEQ ID NO: 1164 - DNA, 20 bp, Artificial sequence
  Synthetic oligonucleotide
tattgcttgaaattctgact

SEQ ID NO: 1165 - DNA, 20 bp, Artificial sequence
  Synthetic oligonucleotide
ttattgcttgaaattctgac

SEQ ID NO: 1166 - DNA, 20 bp, Artificial sequence
  Synthetic oligonucleotide
attattgcttgaaattctga

SEQ ID NO: 1167 - DNA, 20 bp, Artificial sequence
  Synthetic oligonucleotide
tattattgcttgaaattctg

SEQ ID NO: 1168 - DNA, 20 bp, Artificial sequence
  Synthetic oligonucleotide
gtattattgcttgaaattct

SEQ ID NO: 1169 - DNA, 20 bp, Artificial sequence
  Synthetic oligonucleotide
ggtattattgcttgaaattc

SEQ ID NO: 1170 - DNA, 20 bp, Artificial sequence
  Synthetic oligonucleotide
aggtattattgcttgaaatt

SEQ ID NO: 1171 - DNA, 20 bp, Artificial sequence
  Synthetic oligonucleotide
caggtattattgcttgaaat

SEQ ID NO: 1172 - DNA, 20 bp, Artificial sequence
  Synthetic oligonucleotide
gcaggtattattgcttgaaa

SEQ ID NO: 1173 - DNA, 20 bp, Artificial sequence
  Synthetic oligonucleotide
attaacagcaggtattattg

SEQ ID NO: 1174 - DNA, 20 bp, Artificial sequence
  Synthetic oligonucleotide
aattaacagcaggtattatt

SEQ ID NO: 1175 - DNA, 20 bp, Artificial sequence
  Synthetic oligonucleotide
gaattaacagcaggtattat

SEQ ID NO: 1176 - DNA, 20 bp, Artificial sequence
  Synthetic oligonucleotide
ggaattaacagcaggtatta

SEQ ID NO: 1177 - DNA, 20 bp, Artificial sequence
  Synthetic oligonucleotide
gggaattaacagcaggtatt

SEQ ID NO: 1178 - DNA, 20 bp, Artificial sequence
  Synthetic oligonucleotide
tgggaattaacagcaggtat

SEQ ID NO: 1179 - DNA, 20 bp, Artificial sequence
  Synthetic oligonucleotide
gtgggaattaacagcaggta

SEQ ID NO: 1180 - DNA, 20 bp, Artificial sequence
  Synthetic oligonucleotide
tgtgggaattaacagcaggt

SEQ ID NO: 1181 - DNA, 20 bp, Artificial sequence
  Synthetic oligonucleotide
atgtgggaattaacagcagg

SEQ ID NO: 1182 - DNA, 20 bp, Artificial sequence
  Synthetic oligonucleotide
aatgtgggaattaacagcag

SEQ ID NO: 1183 - DNA, 20 bp, Artificial sequence
  Synthetic oligonucleotide
gaatgtgggaattaacagca

SEQ ID NO: 1184 - DNA, 20 bp, Artificial sequence
  Synthetic oligonucleotide
tgaatgtgggaattaacagc

SEQ ID NO: 1185 - DNA, 20 bp, Artificial sequence
  Synthetic oligonucleotide
ctgaatgtgggaattaacag

SEQ ID NO: 1186 - DNA, 20 bp, Artificial sequence
  Synthetic oligonucleotide
actgaatgtgggaattaaca

SEQ ID NO: 1187 - DNA, 20 bp, Artificial sequence
  Synthetic oligonucleotide
gactgaatgtgggaattaac

SEQ ID NO: 1188 - DNA, 20 bp, Artificial sequence
  Synthetic oligonucleotide
tgactgaatgtgggaattaa

SEQ ID NO: 1189 - DNA, 20 bp, Artificial sequence
  Synthetic oligonucleotide
ctgactgaatgtgggaatta

SEQ ID NO: 1190 - DNA, 20 bp, Artificial sequence
  Synthetic oligonucleotide
tctgactgaatgtgggaatt

SEQ ID NO: 1191 - DNA, 20 bp, Artificial sequence
  Synthetic oligonucleotide
gtctgactgaatgtgggaat

SEQ ID NO: 1192 - DNA, 20 bp, Artificial sequence
  Synthetic oligonucleotide
agtctgactgaatgtgggaa

SEQ ID NO: 1193 - DNA, 20 bp, Artificial sequence
  Synthetic oligonucleotide
aagtctgactgaatgtggga

SEQ ID NO: 1194 - DNA, 20 bp, Artificial sequence
  Synthetic oligonucleotide
caagtctgactgaatgtggg

SEQ ID NO: 1195 - DNA, 20 bp, Artificial sequence
  Synthetic oligonucleotide
gcaagtctgactgaatgtgg

SEQ ID NO: 1196 - DNA, 20 bp, Artificial sequence
  Synthetic oligonucleotide
agcaagtctgactgaatgtg

SEQ ID NO: 1197 - DNA, 20 bp, Artificial sequence
  Synthetic oligonucleotide
gagcaagtctgactgaatgt

SEQ ID NO: 1198 - DNA, 20 bp, Artificial sequence
  Synthetic oligonucleotide
ggagcaagtctgactgaatg

SEQ ID NO: 1199 - DNA, 20 bp, Artificial sequence
  Synthetic oligonucleotide
cggagcaagtctgactgaat

SEQ ID NO: 1200 - DNA, 20 bp, Artificial sequence
  Synthetic oligonucleotide
ccggagcaagtctgactgaa

SEQ ID NO: 1201 - DNA, 20 bp, Artificial sequence
  Synthetic oligonucleotide
tccggagcaagtctgactga

SEQ ID NO: 1202 - DNA, 20 bp, Artificial sequence
  Synthetic oligonucleotide
ctaaaataacggtccggagc

SEQ ID NO: 1203 - DNA, 20 bp, Artificial sequence
  Synthetic oligonucleotide
tctaaaataacggtccggag

SEQ ID NO: 1204 - DNA, 20 bp, Artificial sequence
  Synthetic oligonucleotide
ttctaaaataacggtccgga

SEQ ID NO: 1205 - DNA, 20 bp, Artificial sequence
  Synthetic oligonucleotide
tttctaaaataacggtccgg

SEQ ID NO: 1206 - DNA, 20 bp, Artificial sequence
  Synthetic oligonucleotide
atttctaaaataacggtccg

SEQ ID NO: 1207 - DNA, 20 bp, Artificial sequence
  Synthetic oligonucleotide
aatttctaaaataacggtcc

SEQ ID NO: 1208 - DNA, 20 bp, Artificial sequence
  Synthetic oligonucleotide
gaatttctaaaataacggtc

SEQ ID NO: 1209 - DNA, 20 bp, Artificial sequence
  Synthetic oligonucleotide
ggaatttctaaaataacggt

SEQ ID NO: 1210 - DNA, 20 bp, Artificial sequence
  Synthetic oligonucleotide
aggaatttctaaaataacgg

SEQ ID NO: 1211 - DNA, 20 bp, Artificial sequence
  Synthetic oligonucleotide
caggaatttctaaaataacg

SEQ ID NO: 1212 - DNA, 20 bp, Artificial sequence
  Synthetic oligonucleotide
tcaggaatttctaaaataac

SEQ ID NO: 1213 - DNA, 20 bp, Artificial sequence
  Synthetic oligonucleotide
gttcaggaatttctaaaata

SEQ ID NO: 1214 - DNA, 20 bp, Artificial sequence
  Synthetic oligonucleotide
agttcaggaatttctaaaat

SEQ ID NO: 1215 - DNA, 20 bp, Artificial sequence
  Synthetic oligonucleotide
gagttcaggaatttctaaaa

SEQ ID NO: 1216 - DNA, 20 bp, Artificial sequence
  Synthetic oligonucleotide
ggagttcaggaatttctaaa

SEQ ID NO: 1217 - DNA, 20 bp, Artificial sequence
  Synthetic oligonucleotide
aggagttcaggaatttctaa

SEQ ID NO: 1218 - DNA, 20 bp, Artificial sequence
  Synthetic oligonucleotide
gaggagttcaggaatttcta

SEQ ID NO: 1219 - DNA, 20 bp, Artificial sequence
  Synthetic oligonucleotide
tgaggagttcaggaatttct

SEQ ID NO: 1220 - DNA, 20 bp, Artificial sequence
  Synthetic oligonucleotide
ccactggactgaggagttca

SEQ ID NO: 1221 - DNA, 20 bp, Artificial sequence
  Synthetic oligonucleotide
tccactggactgaggagttc

SEQ ID NO: 1222 - DNA, 20 bp, Artificial sequence
  Synthetic oligonucleotide
atgctccactggactgagga

SEQ ID NO: 1223 - DNA, 20 bp, Artificial sequence
  Synthetic oligonucleotide
aatgctccactggactgagg

SEQ ID NO: 1224 - DNA, 20 bp, Artificial sequence
  Synthetic oligonucleotide
taatgctccactggactgag

SEQ ID NO: 1225 - DNA, 20 bp, Artificial sequence
  Synthetic oligonucleotide
gtaatgctccactggactga

SEQ ID NO: 1226 - DNA, 20 bp, Artificial sequence
  Synthetic oligonucleotide
agtaatgctccactggactg

SEQ ID NO: 1227 - DNA, 20 bp, Artificial sequence
  Synthetic oligonucleotide
aagtaatgctccactggact

SEQ ID NO: 1228 - DNA, 20 bp, Artificial sequence
  Synthetic oligonucleotide
taagtaatgctccactggac

SEQ ID NO: 1229 - DNA, 20 bp, Artificial sequence
  Synthetic oligonucleotide
ttaagtaatgctccactgga

SEQ ID NO: 1230 - DNA, 20 bp, Artificial sequence
  Synthetic oligonucleotide
tttaagtaatgctccactgg

SEQ ID NO: 1231 - DNA, 20 bp, Artificial sequence
  Synthetic oligonucleotide
ctttaagtaatgctccactg

SEQ ID NO: 1232 - DNA, 20 bp, Artificial sequence
  Synthetic oligonucleotide
tctttaagtaatgctccact

SEQ ID NO: 1233 - DNA, 20 bp, Artificial sequence
  Synthetic oligonucleotide
atctttaagtaatgctccac

SEQ ID NO: 1234 - DNA, 20 bp, Artificial sequence
  Synthetic oligonucleotide
tatctttaagtaatgctcca

SEQ ID NO: 1235 - DNA, 20 bp, Artificial sequence
  Synthetic oligonucleotide
gtatctttaagtaatgctcc

SEQ ID NO: 1236 - DNA, 20 bp, Artificial sequence
  Synthetic oligonucleotide
agtatctttaagtaatgctc

SEQ ID NO: 1237 - DNA, 20 bp, Artificial sequence
  Synthetic oligonucleotide
gagtatctttaagtaatgct

SEQ ID NO: 1238 - DNA, 20 bp, Artificial sequence
  Synthetic oligonucleotide
tgagtatctttaagtaatgc

SEQ ID NO: 1239 - DNA, 20 bp, Artificial sequence
  Synthetic oligonucleotide
ttgagtatctttaagtaatg

SEQ ID NO: 1240 - DNA, 20 bp, Artificial sequence
  Synthetic oligonucleotide
cattgagtatctttaagtaa

SEQ ID NO: 1241 - DNA, 20 bp, Artificial sequence
  Synthetic oligonucleotide
tcattgagtatctttaagta

SEQ ID NO: 1242 - DNA, 20 bp, Artificial sequence
  Synthetic oligonucleotide
ttcattgagtatctttaagt

SEQ ID NO: 1243 - DNA, 20 bp, Artificial sequence
  Synthetic oligonucleotide
gttcattgagtatctttaag

SEQ ID NO: 1244 - DNA, 20 bp, Artificial sequence
  Synthetic oligonucleotide
tgttcattgagtatctttaa

SEQ ID NO: 1245 - DNA, 20 bp, Artificial sequence
  Synthetic oligonucleotide
ttgttcattgagtatcttta

SEQ ID NO: 1246 - DNA, 20 bp, Artificial sequence
  Synthetic oligonucleotide
cttgttcattgagtatcttt

SEQ ID NO: 1247 - DNA, 20 bp, Artificial sequence
  Synthetic oligonucleotide
gcttgttcattgagtatctt

SEQ ID NO: 1248 - DNA, 20 bp, Artificial sequence
  Synthetic oligonucleotide
agcttgttcattgagtatct

SEQ ID NO: 1249 - DNA, 20 bp, Artificial sequence
  Synthetic oligonucleotide
cagcttgttcattgagtatc

SEQ ID NO: 1250 - DNA, 20 bp, Artificial sequence
  Synthetic oligonucleotide
gcagcttgttcattgagtat

SEQ ID NO: 1251 - DNA, 20 bp, Artificial sequence
  Synthetic oligonucleotide
ggcagcttgttcattgagta

SEQ ID NO: 1252 - DNA, 20 bp, Artificial sequence
  Synthetic oligonucleotide
tggcagcttgttcattgagt

SEQ ID NO: 1253 - DNA, 20 bp, Artificial sequence
  Synthetic oligonucleotide
ttggcagcttgttcattgag

SEQ ID NO: 1254 - DNA, 20 bp, Artificial sequence
  Synthetic oligonucleotide
tttggcagcttgttcattga

SEQ ID NO: 1255 - DNA, 20 bp, Artificial sequence
  Synthetic oligonucleotide
ctttggcagcttgttcattg

SEQ ID NO: 1256 - DNA, 20 bp, Artificial sequence
  Synthetic oligonucleotide
actttggcagcttgttcatt

SEQ ID NO: 1257 - DNA, 20 bp, Artificial sequence
  Synthetic oligonucleotide
aactttggcagcttgttcat

SEQ ID NO: 1258 - DNA, 20 bp, Artificial sequence
  Synthetic oligonucleotide
caactttggcagcttgttca

SEQ ID NO: 1259 - DNA, 20 bp, Artificial sequence
  Synthetic oligonucleotide
cagttttatccccaactttg

SEQ ID NO: 1260 - DNA, 20 bp, Artificial sequence
  Synthetic oligonucleotide
tcagttttatccccaacttt

SEQ ID NO: 1261 - DNA, 20 bp, Artificial sequence
  Synthetic oligonucleotide
ttcagttttatccccaactt

SEQ ID NO: 1262 - DNA, 20 bp, Artificial sequence
  Synthetic oligonucleotide
attcagttttatccccaact

SEQ ID NO: 1263 - DNA, 20 bp, Artificial sequence
  Synthetic oligonucleotide
aattcagttttatccccaac

SEQ ID NO: 1264 - DNA, 20 bp, Artificial sequence
  Synthetic oligonucleotide
taattcagttttatccccaa

SEQ ID NO: 1265 - DNA, 20 bp, Artificial sequence
  Synthetic oligonucleotide
ataattcagttttatcccca

SEQ ID NO: 1266 - DNA, 20 bp, Artificial sequence
  Synthetic oligonucleotide
aataattcagttttatcccc

SEQ ID NO: 1267 - DNA, 20 bp, Artificial sequence
  Synthetic oligonucleotide
aaataattcagttttatccc

SEQ ID NO: 1268 - DNA, 20 bp, Artificial sequence
  Synthetic oligonucleotide
ggtctttaaataattcagtt

SEQ ID NO: 1269 - DNA, 20 bp, Artificial sequence
  Synthetic oligonucleotide
aggtctttaaataattcagt

SEQ ID NO: 1270 - DNA, 20 bp, Artificial sequence
  Synthetic oligonucleotide
aaggtctttaaataattcag

SEQ ID NO: 1271 - DNA, 20 bp, Artificial sequence
  Synthetic oligonucleotide
gaaaggtctttaaataattc

SEQ ID NO: 1272 - DNA, 20 bp, Artificial sequence
  Synthetic oligonucleotide
cagaaaggtctttaaataat

SEQ ID NO: 1273 - DNA, 20 bp, Artificial sequence
  Synthetic oligonucleotide
tcagaaaggtctttaaataa

SEQ ID NO: 1274 - DNA, 20 bp, Artificial sequence
  Synthetic oligonucleotide
gtcagaaaggtctttaaata

SEQ ID NO: 1275 - DNA, 20 bp, Artificial sequence
  Synthetic oligonucleotide
agtcagaaaggtctttaaat

SEQ ID NO: 1276 - DNA, 20 bp, Artificial sequence
  Synthetic oligonucleotide
aagtcagaaaggtctttaaa

SEQ ID NO: 1277 - DNA, 20 bp, Artificial sequence
  Synthetic oligonucleotide
gaagtcagaaaggtctttaa

SEQ ID NO: 1278 - DNA, 20 bp, Artificial sequence
  Synthetic oligonucleotide
ggaagtcagaaaggtcttta

SEQ ID NO: 1279 - DNA, 20 bp, Artificial sequence
  Synthetic oligonucleotide
gggaagtcagaaaggtcttt

SEQ ID NO: 1280 - DNA, 20 bp, Artificial sequence
  Synthetic oligonucleotide
agggaagtcagaaaggtctt

SEQ ID NO: 1281 - DNA, 20 bp, Artificial sequence
  Synthetic oligonucleotide
aagggaagtcagaaaggtct

SEQ ID NO: 1282 - DNA, 20 bp, Artificial sequence
  Synthetic oligonucleotide
aaagggaagtcagaaaggtc

SEQ ID NO: 1283 - DNA, 20 bp, Artificial sequence
  Synthetic oligonucleotide
taaagggaagtcagaaaggt

SEQ ID NO: 1284 - DNA, 20 bp, Artificial sequence
  Synthetic oligonucleotide
ttaaagggaagtcagaaagg

SEQ ID NO: 1285 - DNA, 20 bp, Artificial sequence
  Synthetic oligonucleotide
attaaagggaagtcagaaag

SEQ ID NO: 1286 - DNA, 20 bp, Artificial sequence
  Synthetic oligonucleotide
tattaaagggaagtcagaaa

SEQ ID NO: 1287 - DNA, 20 bp, Artificial sequence
  Synthetic oligonucleotide
ttattaaagggaagtcagaa

SEQ ID NO: 1288 - DNA, 20 bp, Artificial sequence
  Synthetic oligonucleotide
tttattaaagggaagtcaga

SEQ ID NO: 1289 - DNA, 20 bp, Artificial sequence
  Synthetic oligonucleotide
ttttattaaagggaagtcag

SEQ ID NO: 1290 - DNA, 20 bp, Artificial sequence
  Synthetic oligonucleotide
tttttattaaagggaagtca

SEQ ID NO: 1291 - DNA, 20 bp, Artificial sequence
  Synthetic oligonucleotide
atttcatccttcctcttttt

SEQ ID NO: 1292 - DNA, 20 bp, Artificial sequence
  Synthetic oligonucleotide
aatttcatccttcctctttt

SEQ ID NO: 1293 - DNA, 20 bp, Artificial sequence
  Synthetic oligonucleotide
gaatttcatccttcctcttt

SEQ ID NO: 1294 - DNA, 20 bp, Artificial sequence
  Synthetic oligonucleotide
tgaatttcatccttcctctt

SEQ ID NO: 1295 - DNA, 20 bp, Artificial sequence
  Synthetic oligonucleotide
ttgaatttcatccttcctct

SEQ ID NO: 1296 - DNA, 20 bp, Artificial sequence
  Synthetic oligonucleotide
cttgaatttcatccttcctc

SEQ ID NO: 1297 - DNA, 20 bp, Artificial sequence
  Synthetic oligonucleotide
ccttgaatttcatccttcct

SEQ ID NO: 1298 - DNA, 20 bp, Artificial sequence
  Synthetic oligonucleotide
accttgaatttcatccttcc

SEQ ID NO: 1299 - DNA, 20 bp, Artificial sequence
  Synthetic oligonucleotide
caccttgaatttcatccttc

SEQ ID NO: 1300 - DNA, 20 bp, Artificial sequence
  Synthetic oligonucleotide
acaccttgaatttcatcctt

SEQ ID NO: 1301 - DNA, 20 bp, Artificial sequence
  Synthetic oligonucleotide
aacaccttgaatttcatcct

SEQ ID NO: 1302 - DNA, 20 bp, Artificial sequence
  Synthetic oligonucleotide
taacaccttgaatttcatcc

SEQ ID NO: 1303 - DNA, 20 bp, Artificial sequence
  Synthetic oligonucleotide
ataacaccttgaatttcatc

SEQ ID NO: 1304 - DNA, 20 bp, Artificial sequence
  Synthetic oligonucleotide
aataacaccttgaatttcat

SEQ ID NO: 1305 - DNA, 20 bp, Artificial sequence
  Synthetic oligonucleotide
caataacaccttgaatttca

SEQ ID NO: 1306 - DNA, 20 bp, Artificial sequence
  Synthetic oligonucleotide
tcaataacaccttgaatttc

SEQ ID NO: 1307 - DNA, 20 bp, Artificial sequence
  Synthetic oligonucleotide
gtcaataacaccttgaattt

SEQ ID NO: 1308 - DNA, 20 bp, Artificial sequence
  Synthetic oligonucleotide
cgtcaataacaccttgaatt

SEQ ID NO: 1309 - DNA, 20 bp, Artificial sequence
  Synthetic oligonucleotide
tcgtcaataacaccttgaat

SEQ ID NO: 1310 - DNA, 20 bp, Artificial sequence
  Synthetic oligonucleotide
ctcgtcaataacaccttgaa

SEQ ID NO: 1311 - DNA, 20 bp, Artificial sequence
  Synthetic oligonucleotide
tctcgtcaataacaccttga

SEQ ID NO: 1312 - DNA, 20 bp, Artificial sequence
  Synthetic oligonucleotide
atctcgtcaataacaccttg

SEQ ID NO: 1313 - DNA, 20 bp, Artificial sequence
  Synthetic oligonucleotide
gatctcgtcaataacacctt

SEQ ID NO: 1314 - DNA, 20 bp, Artificial sequence
  Synthetic oligonucleotide
ggatctcgtcaataacacct

SEQ ID NO: 1315 - DNA, 20 bp, Artificial sequence
  Synthetic oligonucleotide
cggatctcgtcaataacacc

SEQ ID NO: 1316 - DNA, 20 bp, Artificial sequence
  Synthetic oligonucleotide
tttcgtatttcttgcaaatg

SEQ ID NO: 1317 - DNA, 20 bp, Artificial sequence
  Synthetic oligonucleotide
ttttcgtatttcttgcaaat

SEQ ID NO: 1318 - DNA, 20 bp, Artificial sequence
  Synthetic oligonucleotide
tttttcgtatttcttgcaaa

SEQ ID NO: 1319 - DNA, 20 bp, Artificial sequence
  Synthetic oligonucleotide
atttttcgtatttcttgcaa

SEQ ID NO: 1320 - DNA, 20 bp, Artificial sequence
  Synthetic oligonucleotide
tatttttcgtatttcttgca

SEQ ID NO: 1321 - DNA, 20 bp, Artificial sequence
  Synthetic oligonucleotide
gtatttttcgtatttcttgc

SEQ ID NO: 1322 - DNA, 20 bp, Artificial sequence
  Synthetic oligonucleotide
agtatttttcgtatttcttg

SEQ ID NO: 1323 - DNA, 20 bp, Artificial sequence
  Synthetic oligonucleotide
tattgtgcagaaggattttt

SEQ ID NO: 1324 - DNA, 20 bp, Artificial sequence
  Synthetic oligonucleotide
atattgtgcagaaggatttt

SEQ ID NO: 1325 - DNA, 20 bp, Artificial sequence
  Synthetic oligonucleotide
catattgtgcagaaggattt

SEQ ID NO: 1326 - DNA, 20 bp, Artificial sequence
  Synthetic oligonucleotide
acatattgtgcagaaggatt

SEQ ID NO: 1327 - DNA, 20 bp, Artificial sequence
  Synthetic oligonucleotide
ctgatactgtcacatattgt

SEQ ID NO: 1328 - DNA, 20 bp, Artificial sequence
  Synthetic oligonucleotide
cctgatactgtcacatattg

SEQ ID NO: 1329 - DNA, 20 bp, Artificial sequence
  Synthetic oligonucleotide
tcctgatactgtcacatatt

SEQ ID NO: 1330 - DNA, 20 bp, Artificial sequence
  Synthetic oligonucleotide
gtcctgatactgtcacatat

SEQ ID NO: 1331 - DNA, 20 bp, Artificial sequence
  Synthetic oligonucleotide
tgtcctgatactgtcacata

SEQ ID NO: 1332 - DNA, 20 bp, Artificial sequence
  Synthetic oligonucleotide
ctgtcctgatactgtcacat

SEQ ID NO: 1333 - DNA, 20 bp, Artificial sequence
  Synthetic oligonucleotide
cctgtcctgatactgtcaca

SEQ ID NO: 1334 - DNA, 20 bp, Artificial sequence
  Synthetic oligonucleotide
tcctgtcctgatactgtcac

SEQ ID NO: 1335 - DNA, 20 bp, Artificial sequence
  Synthetic oligonucleotide
ctcctgtcctgatactgtca

SEQ ID NO: 1336 - DNA, 20 bp, Artificial sequence
  Synthetic oligonucleotide
actcctgtcctgatactgtc

SEQ ID NO: 1337 - DNA, 20 bp, Artificial sequence
  Synthetic oligonucleotide
aactcctgtcctgatactgt

SEQ ID NO: 1338 - DNA, 20 bp, Artificial sequence
  Synthetic oligonucleotide
aaactcctgtcctgatactg

SEQ ID NO: 1339 - DNA, 20 bp, Artificial sequence
  Synthetic oligonucleotide
taaactcctgtcctgatact

SEQ ID NO: 1340 - DNA, 20 bp, Artificial sequence
  Synthetic oligonucleotide
ataaactcctgtcctgatac

SEQ ID NO: 1341 - DNA, 20 bp, Artificial sequence
  Synthetic oligonucleotide
cataaactcctgtcctgata

SEQ ID NO: 1342 - DNA, 20 bp, Artificial sequence
  Synthetic oligonucleotide
tcataaactcctgtcctgat

SEQ ID NO: 1343 - DNA, 20 bp, Artificial sequence
  Synthetic oligonucleotide
atcataaactcctgtcctga

SEQ ID NO: 1344 - DNA, 20 bp, Artificial sequence
  Synthetic oligonucleotide
tatcataaactcctgtcctg

SEQ ID NO: 1345 - DNA, 20 bp, Artificial sequence
  Synthetic oligonucleotide
ctatcataaactcctgtcct

SEQ ID NO: 1346 - DNA, 20 bp, Artificial sequence
  Synthetic oligonucleotide
tctatcataaactcctgtcc

SEQ ID NO: 1347 - DNA, 20 bp, Artificial sequence
  Synthetic oligonucleotide
ttctatcataaactcctgtc

SEQ ID NO: 1348 - DNA, 20 bp, Artificial sequence
  Synthetic oligonucleotide
tttctatcataaactcctgt

SEQ ID NO: 1349 - DNA, 20 bp, Artificial sequence
  Synthetic oligonucleotide
atttctatcataaactcctg

SEQ ID NO: 1350 - DNA, 20 bp, Artificial sequence
  Synthetic oligonucleotide
tatttctatcataaactcct

SEQ ID NO: 1351 - DNA, 20 bp, Artificial sequence
  Synthetic oligonucleotide
ttatttctatcataaactcc

SEQ ID NO: 1352 - DNA, 20 bp, Artificial sequence
  Synthetic oligonucleotide
gagttctttatttctatcat

SEQ ID NO: 1353 - DNA, 20 bp, Artificial sequence
  Synthetic oligonucleotide
agagttctttatttctatca

SEQ ID NO: 1354 - DNA, 20 bp, Artificial sequence
  Synthetic oligonucleotide
cagagttctttatttctatc

SEQ ID NO: 1355 - DNA, 20 bp, Artificial sequence
  Synthetic oligonucleotide
gcagagttctttatttctat

SEQ ID NO: 1356 - DNA, 20 bp, Artificial sequence
  Synthetic oligonucleotide
agcagagttctttatttcta

SEQ ID NO: 1357 - DNA, 20 bp, Artificial sequence
  Synthetic oligonucleotide
cagcagagttctttatttct

SEQ ID NO: 1358 - DNA, 20 bp, Artificial sequence
  Synthetic oligonucleotide
acagcagagttctttatttc

SEQ ID NO: 1359 - DNA, 20 bp, Artificial sequence
  Synthetic oligonucleotide
tacagcagagttctttattt

SEQ ID NO: 1360 - DNA, 20 bp, Artificial sequence
  Synthetic oligonucleotide
atacagcagagttctttatt

SEQ ID NO: 1361 - DNA, 20 bp, Artificial sequence
  Synthetic oligonucleotide
gatacagcagagttctttat

SEQ ID NO: 1362 - DNA, 20 bp, Artificial sequence
  Synthetic oligonucleotide
agatacagcagagttcttta

SEQ ID NO: 1363 - DNA, 20 bp, Artificial sequence
  Synthetic oligonucleotide
aagatacagcagagttcttt

SEQ ID NO: 1364 - DNA, 20 bp, Artificial sequence
  Synthetic oligonucleotide
caagatacagcagagttctt

SEQ ID NO: 1365 - DNA, 20 bp, Artificial sequence
  Synthetic oligonucleotide
acaagatacagcagagttct

SEQ ID NO: 1366 - DNA, 20 bp, Artificial sequence
  Synthetic oligonucleotide
tacaagatacagcagagttc

SEQ ID NO: 1367 - DNA, 20 bp, Artificial sequence
  Synthetic oligonucleotide
atacaagatacagcagagtt

SEQ ID NO: 1368 - DNA, 20 bp, Artificial sequence
  Synthetic oligonucleotide
tatacaagatacagcagagt

SEQ ID NO: 1369 - DNA, 20 bp, Artificial sequence
  Synthetic oligonucleotide
gtatacaagatacagcagag

SEQ ID NO: 1370 - DNA, 20 bp, Artificial sequence
  Synthetic oligonucleotide
ggtatacaagatacagcaga

SEQ ID NO: 1371 - DNA, 20 bp, Artificial sequence
  Synthetic oligonucleotide
tggtatacaagatacagcag

SEQ ID NO: 1372 - DNA, 20 bp, Artificial sequence
  Synthetic oligonucleotide
ttggtatacaagatacagca

SEQ ID NO: 1373 - DNA, 20 bp, Artificial sequence
  Synthetic oligonucleotide
aacctttacccaatcagttg

SEQ ID NO: 1374 - DNA, 20 bp, Artificial sequence
  Synthetic oligonucleotide
caacctttacccaatcagtt

SEQ ID NO: 1375 - DNA, 20 bp, Artificial sequence
  Synthetic oligonucleotide
ccaacctttacccaatcagt

SEQ ID NO: 1376 - DNA, 20 bp, Artificial sequence
  Synthetic oligonucleotide
tccaacctttacccaatcag

SEQ ID NO: 1377 - DNA, 20 bp, Artificial sequence
  Synthetic oligonucleotide
ttccaacctttacccaatca

SEQ ID NO: 1378 - DNA, 20 bp, Artificial sequence
  Synthetic oligonucleotide
cttccaacctttacccaatc

SEQ ID NO: 1379 - DNA, 20 bp, Artificial sequence
  Synthetic oligonucleotide
gcttccaacctttacccaat

SEQ ID NO: 1380 - DNA, 20 bp, Artificial sequence
  Synthetic oligonucleotide
tgcttccaacctttacccaa

SEQ ID NO: 1381 - DNA, 20 bp, Artificial sequence
  Synthetic oligonucleotide
gtgcttccaacctttaccca

SEQ ID NO: 1382 - DNA, 20 bp, Artificial sequence
  Synthetic oligonucleotide
tgtgcttccaacctttaccc

SEQ ID NO: 1383 - DNA, 20 bp, Artificial sequence
  Synthetic oligonucleotide
ttgtgcttccaacctttacc

SEQ ID NO: 1384 - DNA, 20 bp, Artificial sequence
  Synthetic oligonucleotide
tttgtgcttccaacctttac

SEQ ID NO: 1385 - DNA, 20 bp, Artificial sequence
  Synthetic oligonucleotide
ttttgtgcttccaaccttta

SEQ ID NO: 1386 - DNA, 20 bp, Artificial sequence
  Synthetic oligonucleotide
cttttgtgcttccaaccttt

SEQ ID NO: 1387 - DNA, 20 bp, Artificial sequence
  Synthetic oligonucleotide
gcttttgtgcttccaacctt

SEQ ID NO: 1388 - DNA, 20 bp, Artificial sequence
  Synthetic oligonucleotide
aggagagtgaaagcggctca

SEQ ID NO: 1389 - DNA, 20 bp, Artificial sequence
  Synthetic oligonucleotide
aaggagagtgaaagcggctc

SEQ ID NO: 1390 - DNA, 20 bp, Artificial sequence
  Synthetic oligonucleotide
aaaggagagtgaaagcggct

SEQ ID NO: 1391 - DNA, 20 bp, Artificial sequence
  Synthetic oligonucleotide
aaaaggagagtgaaagcggc

SEQ ID NO: 1392 - DNA, 20 bp, Artificial sequence
  Synthetic oligonucleotide
taaaaggagagtgaaagcgg

SEQ ID NO: 1393 - DNA, 20 bp, Artificial sequence
  Synthetic oligonucleotide
ataaaaggagagtgaaagcg

SEQ ID NO: 1394 - DNA, 20 bp, Artificial sequence
  Synthetic oligonucleotide
aataaaaggagagtgaaagc

SEQ ID NO: 1395 - DNA, 20 bp, Artificial sequence
  Synthetic oligonucleotide
caataaaaggagagtgaaag

SEQ ID NO: 1396 - DNA, 20 bp, Artificial sequence
  Synthetic oligonucleotide
acaataaaaggagagtgaaa

SEQ ID NO: 1397 - DNA, 20 bp, Artificial sequence
  Synthetic oligonucleotide
tacaataaaaggagagtgaa

SEQ ID NO: 1398 - DNA, 20 bp, Artificial sequence
  Synthetic oligonucleotide
ctacaataaaaggagagtga

SEQ ID NO: 1399 - DNA, 20 bp, Artificial sequence
  Synthetic oligonucleotide
tctacaataaaaggagagtg

SEQ ID NO: 1400 - DNA, 20 bp, Artificial sequence
  Synthetic oligonucleotide
ttctacaataaaaggagagt

SEQ ID NO: 1401 - DNA, 20 bp, Artificial sequence
  Synthetic oligonucleotide
tttctacaataaaaggagag

SEQ ID NO: 1402 - DNA, 20 bp, Artificial sequence
  Synthetic oligonucleotide
ttttctacaataaaaggaga

SEQ ID NO: 1403 - DNA, 20 bp, Artificial sequence
  Synthetic oligonucleotide
attttctacaataaaaggag

SEQ ID NO: 1404 - DNA, 20 bp, Artificial sequence
  Synthetic oligonucleotide
gtctgtaattttctacaata

SEQ ID NO: 1405 - DNA, 20 bp, Artificial sequence
  Synthetic oligonucleotide
tgtctgtaattttctacaat

SEQ ID NO: 1406 - DNA, 20 bp, Artificial sequence
  Synthetic oligonucleotide
atgtctgtaattttctacaa

SEQ ID NO: 1407 - DNA, 20 bp, Artificial sequence
  Synthetic oligonucleotide
gatgtctgtaattttctaca

SEQ ID NO: 1408 - DNA, 20 bp, Artificial sequence
  Synthetic oligonucleotide
agatgtctgtaattttctac

SEQ ID NO: 1409 - DNA, 20 bp, Artificial sequence
  Synthetic oligonucleotide
cggagctgattcagatgtct

SEQ ID NO: 1410 - DNA, 20 bp, Artificial sequence
  Synthetic oligonucleotide
ccggagctgattcagatgtc

SEQ ID NO: 1411 - DNA, 20 bp, Artificial sequence
  Synthetic oligonucleotide
cccggagctgattcagatgt

SEQ ID NO: 1412 - DNA, 20 bp, Artificial sequence
  Synthetic oligonucleotide
tcccggagctgattcagatg

SEQ ID NO: 1413 - DNA, 20 bp, Artificial sequence
  Synthetic oligonucleotide
ctcccggagctgattcagat

SEQ ID NO: 1414 - DNA, 20 bp, Artificial sequence
  Synthetic oligonucleotide
tcagcactgcagtcaaggac

SEQ ID NO: 1415 - DNA, 20 bp, Artificial sequence
  Synthetic oligonucleotide
ttcagcactgcagtcaagga

SEQ ID NO: 1416 - DNA, 20 bp, Artificial sequence
  Synthetic oligonucleotide
attcagcactgcagtcaagg

SEQ ID NO: 1417 - DNA, 20 bp, Artificial sequence
  Synthetic oligonucleotide
cattcagcactgcagtcaag

SEQ ID NO: 1418 - DNA, 20 bp, Artificial sequence
  Synthetic oligonucleotide
ccattcagcactgcagtcaa

SEQ ID NO: 1419 - DNA, 20 bp, Artificial sequence
  Synthetic oligonucleotide
gccattcagcactgcagtca

SEQ ID NO: 1420 - DNA, 20 bp, Artificial sequence
  Synthetic oligonucleotide
agccattcagcactgcagtc

SEQ ID NO: 1421 - DNA, 20 bp, Artificial sequence
  Synthetic oligonucleotide
aagccattcagcactgcagt

SEQ ID NO: 1422 - DNA, 20 bp, Artificial sequence
  Synthetic oligonucleotide
caagccattcagcactgcag

SEQ ID NO: 1423 - DNA, 20 bp, Artificial sequence
  Synthetic oligonucleotide
tcaagccattcagcactgca

SEQ ID NO: 1424 - DNA, 20 bp, Artificial sequence
  Synthetic oligonucleotide
atcaagccattcagcactgc

SEQ ID NO: 1425 - DNA, 20 bp, Artificial sequence
  Synthetic oligonucleotide
aatcaagccattcagcactg

SEQ ID NO: 1426 - DNA, 20 bp, Artificial sequence
  Synthetic oligonucleotide
aaatcaagccattcagcact

SEQ ID NO: 1427 - DNA, 20 bp, Artificial sequence
  Synthetic oligonucleotide
aaaatcaagccattcagcac

SEQ ID NO: 1428 - DNA, 20 bp, Artificial sequence
  Synthetic oligonucleotide
gaaaatcaagccattcagca

SEQ ID NO: 1429 - DNA, 20 bp, Artificial sequence
  Synthetic oligonucleotide
agaaaatcaagccattcagc

SEQ ID NO: 1430 - DNA, 20 bp, Artificial sequence
  Synthetic oligonucleotide
tagaaaatcaagccattcag

SEQ ID NO: 1431 - DNA, 20 bp, Artificial sequence
  Synthetic oligonucleotide
ctagaaaatcaagccattca

SEQ ID NO: 1432 - DNA, 20 bp, Artificial sequence
  Synthetic oligonucleotide
tctagaaaatcaagccattc

SEQ ID NO: 1433 - DNA, 20 bp, Artificial sequence
  Synthetic oligonucleotide
ctctagaaaatcaagccatt

SEQ ID NO: 1434 - DNA, 20 bp, Artificial sequence
  Synthetic oligonucleotide
tctctagaaaatcaagccat

SEQ ID NO: 1435 - DNA, 20 bp, Artificial sequence
  Synthetic oligonucleotide
ttctctagaaaatcaagcca

SEQ ID NO: 1436 - DNA, 20 bp, Artificial sequence
  Synthetic oligonucleotide
ttcactgaatttctctagaa

SEQ ID NO: 1437 - DNA, 20 bp, Artificial sequence
  Synthetic oligonucleotide
gttcactgaatttctctaga

SEQ ID NO: 1438 - DNA, 20 bp, Artificial sequence
  Synthetic oligonucleotide
tgttcactgaatttctctag

SEQ ID NO: 1439 - DNA, 20 bp, Artificial sequence
  Synthetic oligonucleotide
atgttcactgaatttctcta

SEQ ID NO: 1440 - DNA, 20 bp, Artificial sequence
  Synthetic oligonucleotide
aatgttcactgaatttctct

SEQ ID NO: 1441 - DNA, 20 bp, Artificial sequence
  Synthetic oligonucleotide
taatgttcactgaatttctc

SEQ ID NO: 1442 - DNA, 20 bp, Artificial sequence
  Synthetic oligonucleotide
ataatgttcactgaatttct

SEQ ID NO: 1443 - DNA, 20 bp, Artificial sequence
  Synthetic oligonucleotide
gataatgttcactgaatttc

SEQ ID NO: 1444 - DNA, 20 bp, Artificial sequence
  Synthetic oligonucleotide
tgataatgttcactgaattt

SEQ ID NO: 1445 - DNA, 20 bp, Artificial sequence
  Synthetic oligonucleotide
acaaggagtgataatgttca

SEQ ID NO: 1446 - DNA, 20 bp, Artificial sequence
  Synthetic oligonucleotide
tgcactgctttacacaagga

SEQ ID NO: 1447 - DNA, 20 bp, Artificial sequence
  Synthetic oligonucleotide
atgcactgctttacacaagg

SEQ ID NO: 1448 - DNA, 20 bp, Artificial sequence
  Synthetic oligonucleotide
gatgcactgctttacacaag

SEQ ID NO: 1449 - DNA, 20 bp, Artificial sequence
  Synthetic oligonucleotide
tgatgcactgctttacacaa

SEQ ID NO: 1450 - DNA, 20 bp, Artificial sequence
  Synthetic oligonucleotide
gtgatgcactgctttacaca

SEQ ID NO: 1451 - DNA, 20 bp, Artificial sequence
  Synthetic oligonucleotide
ggtgatgcactgctttacac

SEQ ID NO: 1452 - DNA, 20 bp, Artificial sequence
  Synthetic oligonucleotide
aggtgatgcactgctttaca

SEQ ID NO: 1453 - DNA, 20 bp, Artificial sequence
  Synthetic oligonucleotide
taggtgatgcactgctttac

SEQ ID NO: 1454 - DNA, 20 bp, Artificial sequence
  Synthetic oligonucleotide
ctaggtgatgcactgcttta

SEQ ID NO: 1455 - DNA, 20 bp, Artificial sequence
  Synthetic oligonucleotide
gctaggtgatgcactgcttt

SEQ ID NO: 1456 - DNA, 20 bp, Artificial sequence
  Synthetic oligonucleotide
tgctaggtgatgcactgctt

SEQ ID NO: 1457 - DNA, 20 bp, Artificial sequence
  Synthetic oligonucleotide
caacagttgctaggtgatgc

SEQ ID NO: 1458 - DNA, 20 bp, Artificial sequence
  Synthetic oligonucleotide
tcaacagttgctaggtgatg

SEQ ID NO: 1459 - DNA, 20 bp, Artificial sequence
  Synthetic oligonucleotide
gtcaacagttgctaggtgat

SEQ ID NO: 1460 - DNA, 20 bp, Artificial sequence
  Synthetic oligonucleotide
agtcaacagttgctaggtga

SEQ ID NO: 1461 - DNA, 20 bp, Artificial sequence
  Synthetic oligonucleotide
cagtcaacagttgctaggtg

SEQ ID NO: 1462 - DNA, 20 bp, Artificial sequence
  Synthetic oligonucleotide
gcagtcaacagttgctaggt

SEQ ID NO: 1463 - DNA, 20 bp, Artificial sequence
  Synthetic oligonucleotide
gaaaatgcagtcaacagttg

SEQ ID NO: 1464 - DNA, 20 bp, Artificial sequence
  Synthetic oligonucleotide
agaaaatgcagtcaacagtt

SEQ ID NO: 1465 - DNA, 20 bp, Artificial sequence
  Synthetic oligonucleotide
gagaaaatgcagtcaacagt

SEQ ID NO: 1466 - DNA, 20 bp, Artificial sequence
  Synthetic oligonucleotide
ggagaaaatgcagtcaacag

SEQ ID NO: 1467 - DNA, 20 bp, Artificial sequence
  Synthetic oligonucleotide
gggagaaaatgcagtcaaca

SEQ ID NO: 1468 - DNA, 20 bp, Artificial sequence
  Synthetic oligonucleotide
agggagaaaatgcagtcaac

SEQ ID NO: 1469 - DNA, 20 bp, Artificial sequence
  Synthetic oligonucleotide
cagggagaaaatgcagtcaa

SEQ ID NO: 1470 - DNA, 20 bp, Artificial sequence
  Synthetic oligonucleotide
ccagggagaaaatgcagtca

SEQ ID NO: 1471 - DNA, 20 bp, Artificial sequence
  Synthetic oligonucleotide
gccagggagaaaatgcagtc

SEQ ID NO: 1472 - DNA, 20 bp, Artificial sequence
  Synthetic oligonucleotide
ggccagggagaaaatgcagt

SEQ ID NO: 1473 - DNA, 20 bp, Artificial sequence
  Synthetic oligonucleotide
tggccagggagaaaatgcag

SEQ ID NO: 1474 - DNA, 20 bp, Artificial sequence
  Synthetic oligonucleotide
ttggccagggagaaaatgca

SEQ ID NO: 1475 - DNA, 20 bp, Artificial sequence
  Synthetic oligonucleotide
cttggccagggagaaaatgc

SEQ ID NO: 1476 - DNA, 20 bp, Artificial sequence
  Synthetic oligonucleotide
ttgcttagcgaccttggcca

SEQ ID NO: 1477 - DNA, 20 bp, Artificial sequence
  Synthetic oligonucleotide
tccttgcttagcgaccttgg

SEQ ID NO: 1478 - DNA, 20 bp, Artificial sequence
  Synthetic oligonucleotide
ctccttgcttagcgaccttg

SEQ ID NO: 1479 - DNA, 20 bp, Artificial sequence
  Synthetic oligonucleotide
tctccttgcttagcgacctt

SEQ ID NO: 1480 - DNA, 20 bp, Artificial sequence
  Synthetic oligonucleotide
atctccttgcttagcgacct

SEQ ID NO: 1481 - DNA, 20 bp, Artificial sequence
  Synthetic oligonucleotide
aatctccttgcttagcgacc

SEQ ID NO: 1482 - DNA, 20 bp, Artificial sequence
  Synthetic oligonucleotide
taatctccttgcttagcgac

SEQ ID NO: 1483 - DNA, 20 bp, Artificial sequence
  Synthetic oligonucleotide
gtaatctccttgcttagcga

SEQ ID NO: 1484 - DNA, 20 bp, Artificial sequence
  Synthetic oligonucleotide
agtaatctccttgcttagcg

SEQ ID NO: 1485 - DNA, 20 bp, Artificial sequence
  Synthetic oligonucleotide
cagtaatctccttgcttagc

SEQ ID NO: 1486 - DNA, 20 bp, Artificial sequence
  Synthetic oligonucleotide
gcagtaatctccttgcttag

SEQ ID NO: 1487 - DNA, 20 bp, Artificial sequence
  Synthetic oligonucleotide
tgcagtaatctccttgctta

SEQ ID NO: 1488 - DNA, 20 bp, Artificial sequence
  Synthetic oligonucleotide
ctgcagtaatctccttgctt

SEQ ID NO: 1489 - DNA, 20 bp, Artificial sequence
  Synthetic oligonucleotide
tctgcagtaatctccttgct

SEQ ID NO: 1490 - DNA, 20 bp, Artificial sequence
  Synthetic oligonucleotide
ggtctgcagtaatctccttg

SEQ ID NO: 1491 - DNA, 20 bp, Artificial sequence
  Synthetic oligonucleotide
tggtctgcagtaatctcctt

SEQ ID NO: 1492 - DNA, 20 bp, Artificial sequence
  Synthetic oligonucleotide
ttggtctgcagtaatctcct

SEQ ID NO: 1493 - DNA, 20 bp, Artificial sequence
  Synthetic oligonucleotide
gttggtctgcagtaatctcc

SEQ ID NO: 1494 - DNA, 20 bp, Artificial sequence
  Synthetic oligonucleotide
agttggtctgcagtaatctc

SEQ ID NO: 1495 - DNA, 20 bp, Artificial sequence
  Synthetic oligonucleotide
cagttggtctgcagtaatct

SEQ ID NO: 1496 - DNA, 20 bp, Artificial sequence
  Synthetic oligonucleotide
tcttcttgtacagttggtct

SEQ ID NO: 1497 - DNA, 20 bp, Artificial sequence
  Synthetic oligonucleotide
ttcttcttgtacagttggtc

SEQ ID NO: 1498 - DNA, 20 bp, Artificial sequence
  Synthetic oligonucleotide
tttcttcttgtacagttggt

SEQ ID NO: 1499 - DNA, 20 bp, Artificial sequence
  Synthetic oligonucleotide
ctttcttcttgtacagttgg

SEQ ID NO: 1500 - DNA, 20 bp, Artificial sequence
  Synthetic oligonucleotide
tctttcttcttgtacagttg

SEQ ID NO: 1501 - DNA, 20 bp, Artificial sequence
  Synthetic oligonucleotide
ttctttcttcttgtacagtt

SEQ ID NO: 1502 - DNA, 20 bp, Artificial sequence
  Synthetic oligonucleotide
tttctttcttcttgtacagt

SEQ ID NO: 1503 - DNA, 20 bp, Artificial sequence
  Synthetic oligonucleotide
ttttctttcttcttgtacag

SEQ ID NO: 1504 - DNA, 20 bp, Artificial sequence
  Synthetic oligonucleotide
tttttctttcttcttgtaca

SEQ ID NO: 1505 - DNA, 20 bp, Artificial sequence
  Synthetic oligonucleotide
atttttctttcttcttgtac

SEQ ID NO: 1506 - DNA, 20 bp, Artificial sequence
  Synthetic oligonucleotide
caatttttctttcttcttgt

SEQ ID NO: 1507 - DNA, 20 bp, Artificial sequence
  Synthetic oligonucleotide
acaatttttctttcttcttg

SEQ ID NO: 1508 - DNA, 20 bp, Artificial sequence
  Synthetic oligonucleotide
acagggtgccttccattttt

SEQ ID NO: 1509 - DNA, 20 bp, Artificial sequence
  Synthetic oligonucleotide
cacagggtgccttccatttt

SEQ ID NO: 1510 - DNA, 20 bp, Artificial sequence
  Synthetic oligonucleotide
tcacagggtgccttccattt

SEQ ID NO: 1511 - DNA, 20 bp, Artificial sequence
  Synthetic oligonucleotide
atcacagggtgccttccatt

SEQ ID NO: 1512 - DNA, 20 bp, Artificial sequence
  Synthetic oligonucleotide
aatcacagggtgccttccat

SEQ ID NO: 1513 - DNA, 20 bp, Artificial sequence
  Synthetic oligonucleotide
caatcacagggtgccttcca

SEQ ID NO: 1514 - DNA, 20 bp, Artificial sequence
  Synthetic oligonucleotide
tcaatcacagggtgccttcc

SEQ ID NO: 1515 - DNA, 20 bp, Artificial sequence
  Synthetic oligonucleotide
atcaatcacagggtgccttc

SEQ ID NO: 1516 - DNA, 20 bp, Artificial sequence
  Synthetic oligonucleotide
catcaatcacagggtgcctt

SEQ ID NO: 1517 - DNA, 20 bp, Artificial sequence
  Synthetic oligonucleotide
acatcaatcacagggtgcct

SEQ ID NO: 1518 - DNA, 20 bp, Artificial sequence
  Synthetic oligonucleotide
cacatcaatcacagggtgcc

SEQ ID NO: 1519 - DNA, 20 bp, Artificial sequence
  Synthetic oligonucleotide
acacatcaatcacagggtgc

SEQ ID NO: 1520 - DNA, 20 bp, Artificial sequence
  Synthetic oligonucleotide
aacacatcaatcacagggtg

SEQ ID NO: 1521 - DNA, 20 bp, Artificial sequence
  Synthetic oligonucleotide
caacacatcaatcacagggt

SEQ ID NO: 1522 - DNA, 20 bp, Artificial sequence
  Synthetic oligonucleotide
gcaacacatcaatcacaggg

SEQ ID NO: 1523 - DNA, 20 bp, Artificial sequence
  Synthetic oligonucleotide
agcaacacatcaatcacagg

SEQ ID NO: 1524 - DNA, 20 bp, Artificial sequence
  Synthetic oligonucleotide
cagcaacacatcaatcacag

SEQ ID NO: 1525 - DNA, 20 bp, Artificial sequence
  Synthetic oligonucleotide
ccagcaacacatcaatcaca

SEQ ID NO: 1526 - DNA, 20 bp, Artificial sequence
  Synthetic oligonucleotide
cccagcaacacatcaatcac

SEQ ID NO: 1527 - DNA, 20 bp, Artificial sequence
  Synthetic oligonucleotide
tcccagcaacacatcaatca

SEQ ID NO: 1528 - DNA, 20 bp, Artificial sequence
  Synthetic oligonucleotide
ctcccagcaacacatcaatc

SEQ ID NO: 1529 - DNA, 20 bp, Artificial sequence
  Synthetic oligonucleotide
tctcccagcaacacatcaat

SEQ ID NO: 1530 - DNA, 20 bp, Artificial sequence
  Synthetic oligonucleotide
ttctcccagcaacacatcaa

SEQ ID NO: 1531 - DNA, 20 bp, Artificial sequence
  Synthetic oligonucleotide
gttctcccagcaacacatca

SEQ ID NO: 1532 - DNA, 20 bp, Artificial sequence
  Synthetic oligonucleotide
tgttctcccagcaacacatc

SEQ ID NO: 1533 - DNA, 20 bp, Artificial sequence
  Synthetic oligonucleotide
ctgttctcccagcaacacat

SEQ ID NO: 1534 - DNA, 20 bp, Artificial sequence
  Synthetic oligonucleotide
cctgttctcccagcaacaca

SEQ ID NO: 1535 - DNA, 20 bp, Artificial sequence
  Synthetic oligonucleotide
tcctgttctcccagcaacac

SEQ ID NO: 1536 - DNA, 20 bp, Artificial sequence
  Synthetic oligonucleotide
atcctgttctcccagcaaca

SEQ ID NO: 1537 - DNA, 20 bp, Artificial sequence
  Synthetic oligonucleotide
gatcctgttctcccagcaac

SEQ ID NO: 1538 - DNA, 20 bp, Artificial sequence
  Synthetic oligonucleotide
tgatcctgttctcccagcaa

SEQ ID NO: 1539 - DNA, 20 bp, Artificial sequence
  Synthetic oligonucleotide
ttgatcctgttctcccagca

SEQ ID NO: 1540 - DNA, 20 bp, Artificial sequence
  Synthetic oligonucleotide
attgatcctgttctcccagc

SEQ ID NO: 1541 - DNA, 20 bp, Artificial sequence
  Synthetic oligonucleotide
tattgatcctgttctcccag

SEQ ID NO: 1542 - DNA, 20 bp, Artificial sequence
  Synthetic oligonucleotide
atattgatcctgttctccca

SEQ ID NO: 1543 - DNA, 20 bp, Artificial sequence
  Synthetic oligonucleotide
catattgatcctgttctccc

SEQ ID NO: 1544 - DNA, 20 bp, Artificial sequence
  Synthetic oligonucleotide
acatattgatcctgttctcc

SEQ ID NO: 1545 - DNA, 20 bp, Artificial sequence
  Synthetic oligonucleotide
gacatattgatcctgttctc

SEQ ID NO: 1546 - DNA, 20 bp, Artificial sequence
  Synthetic oligonucleotide
ggacatattgatcctgttct

SEQ ID NO: 1547 - DNA, 20 bp, Artificial sequence
  Synthetic oligonucleotide
gggacatattgatcctgttc

SEQ ID NO: 1548 - DNA, 20 bp, Artificial sequence
  Synthetic oligonucleotide
tgggacatattgatcctgtt

SEQ ID NO: 1549 - DNA, 20 bp, Artificial sequence
  Synthetic oligonucleotide
aatctgtattatttgggaca

SEQ ID NO: 1550 - DNA, 20 bp, Artificial sequence
  Synthetic oligonucleotide
aaatctgtattatttgggac

SEQ ID NO: 1551 - DNA, 20 bp, Artificial sequence
  Synthetic oligonucleotide
taaatctgtattatttggga

SEQ ID NO: 1552 - DNA, 20 bp, Artificial sequence
  Synthetic oligonucleotide
ataaatctgtattatttggg

SEQ ID NO: 1553 - DNA, 20 bp, Artificial sequence
  Synthetic oligonucleotide
gataaatctgtattatttgg

SEQ ID NO: 1554 - DNA, 20 bp, Artificial sequence
  Synthetic oligonucleotide
ctctgataaatctgtattat

SEQ ID NO: 1555 - DNA, 20 bp, Artificial sequence
  Synthetic oligonucleotide
cctctgataaatctgtatta

SEQ ID NO: 1556 - DNA, 20 bp, Artificial sequence
  Synthetic oligonucleotide
tcctctgataaatctgtatt

SEQ ID NO: 1557 - DNA, 20 bp, Artificial sequence
  Synthetic oligonucleotide
gtcctctgataaatctgtat

SEQ ID NO: 1558 - DNA, 20 bp, Artificial sequence
  Synthetic oligonucleotide
agtcctctgataaatctgta

SEQ ID NO: 1559 - DNA, 20 bp, Artificial sequence
  Synthetic oligonucleotide
gagtcctctgataaatctgt

SEQ ID NO: 1560 - DNA, 20 bp, Artificial sequence
  Synthetic oligonucleotide
tgagtcctctgataaatctg

SEQ ID NO: 1561 - DNA, 20 bp, Artificial sequence
  Synthetic oligonucleotide
ctgagtcctctgataaatct

SEQ ID NO: 1562 - DNA, 20 bp, Artificial sequence
  Synthetic oligonucleotide
tctgagtcctctgataaatc

SEQ ID NO: 1563 - DNA, 20 bp, Artificial sequence
  Synthetic oligonucleotide
ctctgagtcctctgataaat

SEQ ID NO: 1564 - DNA, 20 bp, Artificial sequence
  Synthetic oligonucleotide
tctctgagtcctctgataaa

SEQ ID NO: 1565 - DNA, 20 bp, Artificial sequence
  Synthetic oligonucleotide
ctctctgagtcctctgataa

SEQ ID NO: 1566 - DNA, 20 bp, Artificial sequence
  Synthetic oligonucleotide
tctctctgagtcctctgata

SEQ ID NO: 1567 - DNA, 20 bp, Artificial sequence
  Synthetic oligonucleotide
ctctctctgagtcctctgat

SEQ ID NO: 1568 - DNA, 20 bp, Artificial sequence
  Synthetic oligonucleotide
attatcattactctctctga

SEQ ID NO: 1569 - DNA, 20 bp, Artificial sequence
  Synthetic oligonucleotide
aattatcattactctctctg

SEQ ID NO: 1570 - DNA, 20 bp, Artificial sequence
  Synthetic oligonucleotide
taattatcattactctctct

SEQ ID NO: 1571 - DNA, 20 bp, Artificial sequence
  Synthetic oligonucleotide
tggtccggtaattatcatta

SEQ ID NO: 1572 - DNA, 20 bp, Artificial sequence
  Synthetic oligonucleotide
ttggtccggtaattatcatt

SEQ ID NO: 1573 - DNA, 20 bp, Artificial sequence
  Synthetic oligonucleotide
tttggtccggtaattatcat

SEQ ID NO: 1574 - DNA, 20 bp, Artificial sequence
  Synthetic oligonucleotide
gtttggtccggtaattatca

SEQ ID NO: 1575 - DNA, 20 bp, Artificial sequence
  Synthetic oligonucleotide
tgtttggtccggtaattatc

SEQ ID NO: 1576 - DNA, 20 bp, Artificial sequence
  Synthetic oligonucleotide
atgtttggtccggtaattat

SEQ ID NO: 1577 - DNA, 20 bp, Artificial sequence
  Synthetic oligonucleotide
catgtttggtccggtaatta

SEQ ID NO: 1578 - DNA, 20 bp, Artificial sequence
  Synthetic oligonucleotide
ccatgtttggtccggtaatt

SEQ ID NO: 1579 - DNA, 20 bp, Artificial sequence
  Synthetic oligonucleotide
gctctttccacccatgtttg

SEQ ID NO: 1580 - DNA, 20 bp, Artificial sequence
  Synthetic oligonucleotide
agctctttccacccatgttt

SEQ ID NO: 1581 - DNA, 20 bp, Artificial sequence
  Synthetic oligonucleotide
gagctctttccacccatgtt

SEQ ID NO: 1582 - DNA, 20 bp, Artificial sequence
  Synthetic oligonucleotide
ggagctctttccacccatgt

SEQ ID NO: 1583 - DNA, 20 bp, Artificial sequence
  Synthetic oligonucleotide
ttttatgtaggagctctttc

SEQ ID NO: 1584 - DNA, 20 bp, Artificial sequence
  Synthetic oligonucleotide
gttttatgtaggagctcttt

SEQ ID NO: 1585 - DNA, 20 bp, Artificial sequence
  Synthetic oligonucleotide
tgttttatgtaggagctctt

SEQ ID NO: 1586 - DNA, 20 bp, Artificial sequence
  Synthetic oligonucleotide
ttgttttatgtaggagctct

SEQ ID NO: 1587 - DNA, 20 bp, Artificial sequence
  Synthetic oligonucleotide
cttgttttatgtaggagctc

SEQ ID NO: 1588 - DNA, 20 bp, Artificial sequence
  Synthetic oligonucleotide
acttgttttatgtaggagct

SEQ ID NO: 1589 - DNA, 20 bp, Artificial sequence
  Synthetic oligonucleotide
aacttgttttatgtaggagc

SEQ ID NO: 1590 - DNA, 20 bp, Artificial sequence
  Synthetic oligonucleotide
caacttgttttatgtaggag

SEQ ID NO: 1591 - DNA, 20 bp, Artificial sequence
  Synthetic oligonucleotide
gcaacttgttttatgtagga

SEQ ID NO: 1592 - DNA, 20 bp, Artificial sequence
  Synthetic oligonucleotide
tgcaacttgttttatgtagg

SEQ ID NO: 1593 - DNA, 20 bp, Artificial sequence
  Synthetic oligonucleotide
atgcaacttgttttatgtag

SEQ ID NO: 1594 - DNA, 20 bp, Artificial sequence
  Synthetic oligonucleotide
aatgcaacttgttttatgta

SEQ ID NO: 1595 - DNA, 20 bp, Artificial sequence
  Synthetic oligonucleotide
caatgcaacttgttttatgt

SEQ ID NO: 1596 - DNA, 20 bp, Artificial sequence
  Synthetic oligonucleotide
tcaatgcaacttgttttatg

SEQ ID NO: 1597 - DNA, 20 bp, Artificial sequence
  Synthetic oligonucleotide
atcaatgcaacttgttttat

SEQ ID NO: 1598 - DNA, 20 bp, Artificial sequence
  Synthetic oligonucleotide
aatcaatgcaacttgtttta

SEQ ID NO: 1599 - DNA, 20 bp, Artificial sequence
  Synthetic oligonucleotide
taatcaatgcaacttgtttt

SEQ ID NO: 1600 - DNA, 20 bp, Artificial sequence
  Synthetic oligonucleotide
gtaatcaatgcaacttgttt

SEQ ID NO: 1601 - DNA, 20 bp, Artificial sequence
  Synthetic oligonucleotide
ggtaatcaatgcaacttgtt

SEQ ID NO: 1602 - DNA, 20 bp, Artificial sequence
  Synthetic oligonucleotide
tggtaatcaatgcaacttgt

SEQ ID NO: 1603 - DNA, 20 bp, Artificial sequence
  Synthetic oligonucleotide
atggtaatcaatgcaacttg

SEQ ID NO: 1604 - DNA, 20 bp, Artificial sequence
  Synthetic oligonucleotide
gatggtaatcaatgcaactt

SEQ ID NO: 1605 - DNA, 20 bp, Artificial sequence
  Synthetic oligonucleotide
tgatggtaatcaatgcaact

SEQ ID NO: 1606 - DNA, 20 bp, Artificial sequence
  Synthetic oligonucleotide
agccaatctgagccatgatg

SEQ ID NO: 1607 - DNA, 20 bp, Artificial sequence
  Synthetic oligonucleotide
gagccaatctgagccatgat

SEQ ID NO: 1608 - DNA, 20 bp, Artificial sequence
  Synthetic oligonucleotide
ggagccaatctgagccatga

SEQ ID NO: 1609 - DNA, 20 bp, Artificial sequence
  Synthetic oligonucleotide
aggagccaatctgagccatg

SEQ ID NO: 1610 - DNA, 20 bp, Artificial sequence
  Synthetic oligonucleotide
taggagccaatctgagccat

SEQ ID NO: 1611 - DNA, 20 bp, Artificial sequence
  Synthetic oligonucleotide
ataggagccaatctgagcca

SEQ ID NO: 1612 - DNA, 20 bp, Artificial sequence
  Synthetic oligonucleotide
cataggagccaatctgagcc

SEQ ID NO: 1613 - DNA, 20 bp, Artificial sequence
  Synthetic oligonucleotide
acataggagccaatctgagc

SEQ ID NO: 1614 - DNA, 20 bp, Artificial sequence
  Synthetic oligonucleotide
aacataggagccaatctgag

SEQ ID NO: 1615 - DNA, 20 bp, Artificial sequence
  Synthetic oligonucleotide
gaacataggagccaatctga

SEQ ID NO: 1616 - DNA, 20 bp, Artificial sequence
  Synthetic oligonucleotide
ggaacataggagccaatctg

SEQ ID NO: 1617 - DNA, 20 bp, Artificial sequence
  Synthetic oligonucleotide
aggaacataggagccaatct

SEQ ID NO: 1618 - DNA, 20 bp, Artificial sequence
  Synthetic oligonucleotide
caggaacataggagccaatc

SEQ ID NO: 1619 - DNA, 20 bp, Artificial sequence
  Synthetic oligonucleotide
gcaggaacataggagccaat

SEQ ID NO: 1620 - DNA, 20 bp, Artificial sequence
  Synthetic oligonucleotide
tgcaggaacataggagccaa

SEQ ID NO: 1621 - DNA, 20 bp, Artificial sequence
  Synthetic oligonucleotide
ctgcaggaacataggagcca

SEQ ID NO: 1622 - DNA, 20 bp, Artificial sequence
  Synthetic oligonucleotide
tctgcaggaacataggagcc

SEQ ID NO: 1623 - DNA, 20 bp, Artificial sequence
  Synthetic oligonucleotide
ttctgcaggaacataggagc

SEQ ID NO: 1624 - DNA, 20 bp, Artificial sequence
  Synthetic oligonucleotide
cttctgcaggaacataggag

SEQ ID NO: 1625 - DNA, 20 bp, Artificial sequence
  Synthetic oligonucleotide
tcttctgcaggaacatagga

SEQ ID NO: 1626 - DNA, 20 bp, Artificial sequence
  Synthetic oligonucleotide
ttcttctgcaggaacatagg

SEQ ID NO: 1627 - DNA, 20 bp, Artificial sequence
  Synthetic oligonucleotide
cttcttctgcaggaacatag

SEQ ID NO: 1628 - DNA, 20 bp, Artificial sequence
  Synthetic oligonucleotide
gcttcttctgcaggaacata

SEQ ID NO: 1629 - DNA, 20 bp, Artificial sequence
  Synthetic oligonucleotide
cgcttcttctgcaggaacat

SEQ ID NO: 1630 - DNA, 20 bp, Artificial sequence
  Synthetic oligonucleotide
tcgcttcttctgcaggaaca

SEQ ID NO: 1631 - DNA, 20 bp, Artificial sequence
  Synthetic oligonucleotide
gtcgcttcttctgcaggaac

SEQ ID NO: 1632 - DNA, 20 bp, Artificial sequence
  Synthetic oligonucleotide
tgtcgcttcttctgcaggaa

SEQ ID NO: 1633 - DNA, 20 bp, Artificial sequence
  Synthetic oligonucleotide
ttgtcgcttcttctgcagga

SEQ ID NO: 1634 - DNA, 20 bp, Artificial sequence
  Synthetic oligonucleotide
attgtcgcttcttctgcagg

SEQ ID NO: 1635 - DNA, 20 bp, Artificial sequence
  Synthetic oligonucleotide
aattgtcgcttcttctgcag

SEQ ID NO: 1636 - DNA, 20 bp, Artificial sequence
  Synthetic oligonucleotide
caattgtcgcttcttctgca

SEQ ID NO: 1637 - DNA, 20 bp, Artificial sequence
  Synthetic oligonucleotide
ccaattgtcgcttcttctgc

SEQ ID NO: 1638 - DNA, 20 bp, Artificial sequence
  Synthetic oligonucleotide
cccaattgtcgcttcttctg

SEQ ID NO: 1639 - DNA, 20 bp, Artificial sequence
  Synthetic oligonucleotide
tcccaattgtcgcttcttct

SEQ ID NO: 1640 - DNA, 20 bp, Artificial sequence
  Synthetic oligonucleotide
atcccaattgtcgcttcttc

SEQ ID NO: 1641 - DNA, 20 bp, Artificial sequence
  Synthetic oligonucleotide
aatcccaattgtcgcttctt

SEQ ID NO: 1642 - DNA, 20 bp, Artificial sequence
  Synthetic oligonucleotide
caatcccaattgtcgcttct

SEQ ID NO: 1643 - DNA, 20 bp, Artificial sequence
  Synthetic oligonucleotide
tgccatccacaatcccaatt

SEQ ID NO: 1644 - DNA, 20 bp, Artificial sequence
  Synthetic oligonucleotide
atgccatccacaatcccaat

SEQ ID NO: 1645 - DNA, 20 bp, Artificial sequence
  Synthetic oligonucleotide
aatgccatccacaatcccaa

SEQ ID NO: 1646 - DNA, 20 bp, Artificial sequence
  Synthetic oligonucleotide
aaatgccatccacaatccca

SEQ ID NO: 1647 - DNA, 20 bp, Artificial sequence
  Synthetic oligonucleotide
aaaatgccatccacaatccc

SEQ ID NO: 1648 - DNA, 20 bp, Artificial sequence
  Synthetic oligonucleotide
gaaaatgccatccacaatcc

SEQ ID NO: 1649 - DNA, 20 bp, Artificial sequence
  Synthetic oligonucleotide
tgaaaatgccatccacaatc

SEQ ID NO: 1650 - DNA, 20 bp, Artificial sequence
  Synthetic oligonucleotide
gtgaaaatgccatccacaat

SEQ ID NO: 1651 - DNA, 20 bp, Artificial sequence
  Synthetic oligonucleotide
tgtgaaaatgccatccacaa

SEQ ID NO: 1652 - DNA, 20 bp, Artificial sequence
  Synthetic oligonucleotide
ttgtgaaaatgccatccaca

SEQ ID NO: 1653 - DNA, 20 bp, Artificial sequence
  Synthetic oligonucleotide
cttgtgaaaatgccatccac

SEQ ID NO: 1654 - DNA, 20 bp, Artificial sequence
  Synthetic oligonucleotide
ccttgtgaaaatgccatcca

SEQ ID NO: 1655 - DNA, 20 bp, Artificial sequence
  Synthetic oligonucleotide
tccttgtgaaaatgccatcc

SEQ ID NO: 1656 - DNA, 20 bp, Artificial sequence
  Synthetic oligonucleotide
atccttgtgaaaatgccatc

SEQ ID NO: 1657 - DNA, 20 bp, Artificial sequence
  Synthetic oligonucleotide
catccttgtgaaaatgccat

SEQ ID NO: 1658 - DNA, 20 bp, Artificial sequence
  Synthetic oligonucleotide
ccatccttgtgaaaatgcca

SEQ ID NO: 1659 - DNA, 20 bp, Artificial sequence
  Synthetic oligonucleotide
cccatccttgtgaaaatgcc

SEQ ID NO: 1660 - DNA, 20 bp, Artificial sequence
  Synthetic oligonucleotide
acccatccttgtgaaaatgc

SEQ ID NO: 1661 - DNA, 20 bp, Artificial sequence
  Synthetic oligonucleotide
cacccatccttgtgaaaatg

SEQ ID NO: 1662 - DNA, 20 bp, Artificial sequence
  Synthetic oligonucleotide
gcacccatccttgtgaaaat

SEQ ID NO: 1663 - DNA, 20 bp, Artificial sequence
  Synthetic oligonucleotide
agcacccatccttgtgaaaa

SEQ ID NO: 1664 - DNA, 20 bp, Artificial sequence
  Synthetic oligonucleotide
cagcacccatccttgtgaaa

SEQ ID NO: 1665 - DNA, 20 bp, Artificial sequence
  Synthetic oligonucleotide
gcagcacccatccttgtgaa

SEQ ID NO: 1666 - DNA, 20 bp, Artificial sequence
  Synthetic oligonucleotide
tgcagcacccatccttgtga

SEQ ID NO: 1667 - DNA, 20 bp, Artificial sequence
  Synthetic oligonucleotide
tctgcagcacccatccttgt

SEQ ID NO: 1668 - DNA, 20 bp, Artificial sequence
  Synthetic oligonucleotide
tgtctgcagcacccatcctt

SEQ ID NO: 1669 - DNA, 20 bp, Artificial sequence
  Synthetic oligonucleotide
ttgtctgcagcacccatcct

SEQ ID NO: 1670 - DNA, 20 bp, Artificial sequence
  Synthetic oligonucleotide
attgtctgcagcacccatcc

SEQ ID NO: 1671 - DNA, 20 bp, Artificial sequence
  Synthetic oligonucleotide
tattgtctgcagcacccatc

SEQ ID NO: 1672 - DNA, 20 bp, Artificial sequence
  Synthetic oligonucleotide
atattgtctgcagcacccat

SEQ ID NO: 1673 - DNA, 20 bp, Artificial sequence
  Synthetic oligonucleotide
tatattgtctgcagcaccca

SEQ ID NO: 1674 - DNA, 20 bp, Artificial sequence
  Synthetic oligonucleotide
atatattgtctgcagcaccc

SEQ ID NO: 1675 - DNA, 20 bp, Artificial sequence
  Synthetic oligonucleotide
tatatattgtctgcagcacc

SEQ ID NO: 1676 - DNA, 20 bp, Artificial sequence
  Synthetic oligonucleotide
atatatattgtctgcagcac

SEQ ID NO: 1677 - DNA, 20 bp, Artificial sequence
  Synthetic oligonucleotide
tatatatattgtctgcagca

SEQ ID NO: 1678 - DNA, 20 bp, Artificial sequence
  Synthetic oligonucleotide
ttatatatattgtctgcagc

SEQ ID NO: 1679 - DNA, 20 bp, Artificial sequence
  Synthetic oligonucleotide
tttatatatattgtctgcag

SEQ ID NO: 1680 - DNA, 20 bp, Artificial sequence
  Synthetic oligonucleotide
ctttatatatattgtctgca

SEQ ID NO: 1681 - DNA, 20 bp, Artificial sequence
  Synthetic oligonucleotide
cctttatatatattgtctgc

SEQ ID NO: 1682 - DNA, 20 bp, Artificial sequence
  Synthetic oligonucleotide
tcctttatatatattgtctg

SEQ ID NO: 1683 - DNA, 20 bp, Artificial sequence
  Synthetic oligonucleotide
gtcctttatatatattgtct

SEQ ID NO: 1684 - DNA, 20 bp, Artificial sequence
  Synthetic oligonucleotide
tgtcctttatatatattgtc

SEQ ID NO: 1685 - DNA, 20 bp, Artificial sequence
  Synthetic oligonucleotide
ctgtcctttatatatattgt

SEQ ID NO: 1686 - DNA, 20 bp, Artificial sequence
  Synthetic oligonucleotide
tctgtcctttatatatattg

SEQ ID NO: 1687 - DNA, 20 bp, Artificial sequence
  Synthetic oligonucleotide
ctctgtcctttatatatatt

SEQ ID NO: 1688 - DNA, 20 bp, Artificial sequence
  Synthetic oligonucleotide
actctgtcctttatatatat

SEQ ID NO: 1689 - DNA, 20 bp, Artificial sequence
  Synthetic oligonucleotide
tactctgtcctttatatata

SEQ ID NO: 1690 - DNA, 20 bp, Artificial sequence
  Synthetic oligonucleotide
gtactctgtcctttatatat

SEQ ID NO: 1691 - DNA, 20 bp, Artificial sequence
  Synthetic oligonucleotide
tgtactctgtcctttatata

SEQ ID NO: 1692 - DNA, 20 bp, Artificial sequence
  Synthetic oligonucleotide
atgtactctgtcctttatat

SEQ ID NO: 1693 - DNA, 20 bp, Artificial sequence
  Synthetic oligonucleotide
aatgtactctgtcctttata

SEQ ID NO: 1694 - DNA, 20 bp, Artificial sequence
  Synthetic oligonucleotide
aaatgtactctgtcctttat

SEQ ID NO: 1695 - DNA, 20 bp, Artificial sequence
  Synthetic oligonucleotide
taaatgtactctgtccttta

SEQ ID NO: 1696 - DNA, 20 bp, Artificial sequence
  Synthetic oligonucleotide
ataaatgtactctgtccttt

SEQ ID NO: 1697 - DNA, 20 bp, Artificial sequence
  Synthetic oligonucleotide
cataaatgtactctgtcctt

SEQ ID NO: 1698 - DNA, 20 bp, Artificial sequence
  Synthetic oligonucleotide
ccataaatgtactctgtcct

SEQ ID NO: 1699 - DNA, 20 bp, Artificial sequence
  Synthetic oligonucleotide
tccataaatgtactctgtcc

SEQ ID NO: 1700 - DNA, 20 bp, Artificial sequence
  Synthetic oligonucleotide
ttccataaatgtactctgtc

SEQ ID NO: 1701 - DNA, 20 bp, Artificial sequence
  Synthetic oligonucleotide
cttccataaatgtactctgt

SEQ ID NO: 1702 - DNA, 20 bp, Artificial sequence
  Synthetic oligonucleotide
tcttccataaatgtactctg

SEQ ID NO: 1703 - DNA, 20 bp, Artificial sequence
  Synthetic oligonucleotide
ttcttccataaatgtactct

SEQ ID NO: 1704 - DNA, 20 bp, Artificial sequence
  Synthetic oligonucleotide
gttcttccataaatgtactc

SEQ ID NO: 1705 - DNA, 20 bp, Artificial sequence
  Synthetic oligonucleotide
agttcttccataaatgtact

SEQ ID NO: 1706 - DNA, 20 bp, Artificial sequence
  Synthetic oligonucleotide
cagttcttccataaatgtac

SEQ ID NO: 1707 - DNA, 20 bp, Artificial sequence
  Synthetic oligonucleotide
tcagttcttccataaatgta

SEQ ID NO: 1708 - DNA, 20 bp, Artificial sequence
  Synthetic oligonucleotide
gtcagttcttccataaatgt

SEQ ID NO: 1709 - DNA, 20 bp, Artificial sequence
  Synthetic oligonucleotide
agtcagttcttccataaatg

SEQ ID NO: 1710 - DNA, 20 bp, Artificial sequence
  Synthetic oligonucleotide
cagtcagttcttccataaat

SEQ ID NO: 1711 - DNA, 20 bp, Artificial sequence
  Synthetic oligonucleotide
tcagtcagttcttccataaa

SEQ ID NO: 1712 - DNA, 20 bp, Artificial sequence
  Synthetic oligonucleotide
gtcagtcagttcttccataa

SEQ ID NO: 1713 - DNA, 20 bp, Artificial sequence
  Synthetic oligonucleotide
tgtcagtcagttcttccata

SEQ ID NO: 1714 - DNA, 20 bp, Artificial sequence
  Synthetic oligonucleotide
gtgtcagtcagttcttccat

SEQ ID NO: 1715 - DNA, 20 bp, Artificial sequence
  Synthetic oligonucleotide
tgtgtcagtcagttcttcca

SEQ ID NO: 1716 - DNA, 20 bp, Artificial sequence
  Synthetic oligonucleotide
ctgtgtcagtcagttcttcc

SEQ ID NO: 1717 - DNA, 20 bp, Artificial sequence
  Synthetic oligonucleotide
gctgtgtcagtcagttcttc

SEQ ID NO: 1718 - DNA, 20 bp, Artificial sequence
  Synthetic oligonucleotide
tgctgtgtcagtcagttctt

SEQ ID NO: 1719 - DNA, 20 bp, Artificial sequence
  Synthetic oligonucleotide
ctgctgtgtcagtcagttct

SEQ ID NO: 1720 - DNA, 20 bp, Artificial sequence
  Synthetic oligonucleotide
tctgctgtgtcagtcagttc

SEQ ID NO: 1721 - DNA, 20 bp, Artificial sequence
  Synthetic oligonucleotide
ttctgctgtgtcagtcagtt

SEQ ID NO: 1722 - DNA, 20 bp, Artificial sequence
  Synthetic oligonucleotide
tttctgctgtgtcagtcagt

SEQ ID NO: 1723 - DNA, 20 bp, Artificial sequence
  Synthetic oligonucleotide
atttctgctgtgtcagtcag

SEQ ID NO: 1724 - DNA, 20 bp, Artificial sequence
  Synthetic oligonucleotide
tatttctgctgtgtcagtca

SEQ ID NO: 1725 - DNA, 20 bp, Artificial sequence
  Synthetic oligonucleotide
ttatttctgctgtgtcagtc

SEQ ID NO: 1726 - DNA, 20 bp, Artificial sequence
  Synthetic oligonucleotide
attatttctgctgtgtcagt

SEQ ID NO: 1727 - DNA, 20 bp, Artificial sequence
  Synthetic oligonucleotide
gattatttctgctgtgtcag

SEQ ID NO: 1728 - DNA, 20 bp, Artificial sequence
  Synthetic oligonucleotide
tgattatttctgctgtgtca

SEQ ID NO: 1729 - DNA, 20 bp, Artificial sequence
  Synthetic oligonucleotide
ctgattatttctgctgtgtc

SEQ ID NO: 1730 - DNA, 20 bp, Artificial sequence
  Synthetic oligonucleotide
tctgattatttctgctgtgt

SEQ ID NO: 1731 - DNA, 20 bp, Artificial sequence
  Synthetic oligonucleotide
ttctgattatttctgctgtg

SEQ ID NO: 1732 - DNA, 20 bp, Artificial sequence
  Synthetic oligonucleotide
tttctgattatttctgctgt

SEQ ID NO: 1733 - DNA, 20 bp, Artificial sequence
  Synthetic oligonucleotide
ttttctgattatttctgctg

SEQ ID NO: 1734 - DNA, 20 bp, Artificial sequence
  Synthetic oligonucleotide
cttttctgattatttctgct

SEQ ID NO: 1735 - DNA, 20 bp, Artificial sequence
  Synthetic oligonucleotide
gcttttctgattatttctgc

SEQ ID NO: 1736 - DNA, 20 bp, Artificial sequence
  Synthetic oligonucleotide
tgcttttctgattatttctg

SEQ ID NO: 1737 - DNA, 20 bp, Artificial sequence
  Synthetic oligonucleotide
ttgcttttctgattatttct

SEQ ID NO: 1738 - DNA, 20 bp, Artificial sequence
  Synthetic oligonucleotide
gttgcttttctgattatttc

SEQ ID NO: 1739 - DNA, 20 bp, Artificial sequence
  Synthetic oligonucleotide
tgttgcttttctgattattt

SEQ ID NO: 1740 - DNA, 20 bp, Artificial sequence
  Synthetic oligonucleotide
atgttgcttttctgattatt

SEQ ID NO: 1741 - DNA, 20 bp, Artificial sequence
  Synthetic oligonucleotide
gatgttgcttttctgattat

SEQ ID NO: 1742 - DNA, 20 bp, Artificial sequence
  Synthetic oligonucleotide
tgatgttgcttttctgatta

SEQ ID NO: 1743 - DNA, 20 bp, Artificial sequence
  Synthetic oligonucleotide
gtgatgttgcttttctgatt

SEQ ID NO: 1744 - DNA, 20 bp, Artificial sequence
  Synthetic oligonucleotide
tgtgatgttgcttttctgat

SEQ ID NO: 1745 - DNA, 20 bp, Artificial sequence
  Synthetic oligonucleotide
ctgtgatgttgcttttctga

SEQ ID NO: 1746 - DNA, 20 bp, Artificial sequence
  Synthetic oligonucleotide
actgtgatgttgcttttctg

SEQ ID NO: 1747 - DNA, 20 bp, Artificial sequence
  Synthetic oligonucleotide
gactgtgatgttgcttttct

SEQ ID NO: 1748 - DNA, 20 bp, Artificial sequence
  Synthetic oligonucleotide
ggactgtgatgttgcttttc

SEQ ID NO: 1749 - DNA, 20 bp, Artificial sequence
  Synthetic oligonucleotide
aggactgtgatgttgctttt

SEQ ID NO: 1750 - DNA, 20 bp, Artificial sequence
  Synthetic oligonucleotide
aaggactgtgatgttgcttt

SEQ ID NO: 1751 - DNA, 20 bp, Artificial sequence
  Synthetic oligonucleotide
caaggactgtgatgttgctt

SEQ ID NO: 1752 - DNA, 20 bp, Artificial sequence
  Synthetic oligonucleotide
ccaaggactgtgatgttgct

SEQ ID NO: 1753 - DNA, 20 bp, Artificial sequence
  Synthetic oligonucleotide
accaaggactgtgatgttgc

SEQ ID NO: 1754 - DNA, 20 bp, Artificial sequence
  Synthetic oligonucleotide
aaccaaggactgtgatgttg

SEQ ID NO: 1755 - DNA, 20 bp, Artificial sequence
  Synthetic oligonucleotide
taaccaaggactgtgatgtt

SEQ ID NO: 1756 - DNA, 20 bp, Artificial sequence
  Synthetic oligonucleotide
ataaccaaggactgtgatgt

SEQ ID NO: 1757 - DNA, 20 bp, Artificial sequence
  Synthetic oligonucleotide
gataaccaaggactgtgatg

SEQ ID NO: 1758 - DNA, 20 bp, Artificial sequence
  Synthetic oligonucleotide
agataaccaaggactgtgat

SEQ ID NO: 1759 - DNA, 20 bp, Artificial sequence
  Synthetic oligonucleotide
aagataaccaaggactgtga

SEQ ID NO: 1760 - DNA, 20 bp, Artificial sequence
  Synthetic oligonucleotide
caagataaccaaggactgtg

SEQ ID NO: 1761 - DNA, 20 bp, Artificial sequence
  Synthetic oligonucleotide
ccaagataaccaaggactgt

SEQ ID NO: 1762 - DNA, 20 bp, Artificial sequence
  Synthetic oligonucleotide
tccaagataaccaaggactg

SEQ ID NO: 1763 - DNA, 20 bp, Artificial sequence
  Synthetic oligonucleotide
atccaagataaccaaggact

SEQ ID NO: 1764 - DNA, 20 bp, Artificial sequence
  Synthetic oligonucleotide
catccaagataaccaaggac

SEQ ID NO: 1765 - DNA, 20 bp, Artificial sequence
  Synthetic oligonucleotide
tcatccaagataaccaagga

SEQ ID NO: 1766 - DNA, 20 bp, Artificial sequence
  Synthetic oligonucleotide
ttcatccaagataaccaagg

SEQ ID NO: 1767 - DNA, 20 bp, Artificial sequence
  Synthetic oligonucleotide
gttcatccaagataaccaag

SEQ ID NO: 1768 - DNA, 20 bp, Artificial sequence
  Synthetic oligonucleotide
agttcatccaagataaccaa

SEQ ID NO: 1769 - DNA, 20 bp, Artificial sequence
  Synthetic oligonucleotide
tagttcatccaagataacca

SEQ ID NO: 1770 - DNA, 20 bp, Artificial sequence
  Synthetic oligonucleotide
ctagttcatccaagataacc

SEQ ID NO: 1771 - DNA, 20 bp, Artificial sequence
  Synthetic oligonucleotide
cctagttcatccaagataac

SEQ ID NO: 1772 - DNA, 20 bp, Artificial sequence
  Synthetic oligonucleotide
tcctagttcatccaagataa

SEQ ID NO: 1773 - DNA, 20 bp, Artificial sequence
  Synthetic oligonucleotide
ttcctagttcatccaagata

SEQ ID NO: 1774 - DNA, 20 bp, Artificial sequence
  Synthetic oligonucleotide
cttcctagttcatccaagat

SEQ ID NO: 1775 - DNA, 20 bp, Artificial sequence
  Synthetic oligonucleotide
tcttcctagttcatccaaga

SEQ ID NO: 1776 - DNA, 20 bp, Artificial sequence
  Synthetic oligonucleotide
ctcttcctagttcatccaag

SEQ ID NO: 1777 - DNA, 20 bp, Artificial sequence
  Synthetic oligonucleotide
cctcttcctagttcatccaa

SEQ ID NO: 1778 - DNA, 20 bp, Artificial sequence
  Synthetic oligonucleotide
ccctcttcctagttcatcca

SEQ ID NO: 1779 - DNA, 20 bp, Artificial sequence
  Synthetic oligonucleotide
tccctcttcctagttcatcc

SEQ ID NO: 1780 - DNA, 20 bp, Artificial sequence
  Synthetic oligonucleotide
gtccctcttcctagttcatc

SEQ ID NO: 1781 - DNA, 20 bp, Artificial sequence
  Synthetic oligonucleotide
cgtccctcttcctagttcat

SEQ ID NO: 1782 - DNA, 20 bp, Artificial sequence
  Synthetic oligonucleotide
tcgtccctcttcctagttca

SEQ ID NO: 1783 - DNA, 20 bp, Artificial sequence
  Synthetic oligonucleotide
ctcgtccctcttcctagttc

SEQ ID NO: 1784 - DNA, 20 bp, Artificial sequence
  Synthetic oligonucleotide
gctcgtccctcttcctagtt

SEQ ID NO: 1785 - DNA, 20 bp, Artificial sequence
  Synthetic oligonucleotide
tgctcgtccctcttcctagt

SEQ ID NO: 1786 - DNA, 20 bp, Artificial sequence
  Synthetic oligonucleotide
agtgctcgtccctcttccta

SEQ ID NO: 1787 - DNA, 20 bp, Artificial sequence
  Synthetic oligonucleotide
atgagtgctcgtccctcttc

SEQ ID NO: 1788 - DNA, 20 bp, Artificial sequence
  Synthetic oligonucleotide
catgagtgctcgtccctctt

SEQ ID NO: 1789 - DNA, 20 bp, Artificial sequence
  Synthetic oligonucleotide
tcatgagtgctcgtccctct

SEQ ID NO: 1790 - DNA, 20 bp, Artificial sequence
  Synthetic oligonucleotide
atcatgagtgctcgtccctc

SEQ ID NO: 1791 - DNA, 20 bp, Artificial sequence
  Synthetic oligonucleotide
catcatgagtgctcgtccct

SEQ ID NO: 1792 - DNA, 20 bp, Artificial sequence
  Synthetic oligonucleotide
tccatcatgagtgctcgtcc

SEQ ID NO: 1793 - DNA, 20 bp, Artificial sequence
  Synthetic oligonucleotide
ttccatcatgagtgctcgtc

SEQ ID NO: 1794 - DNA, 20 bp, Artificial sequence
  Synthetic oligonucleotide
attccatcatgagtgctcgt

SEQ ID NO: 1795 - DNA, 20 bp, Artificial sequence
  Synthetic oligonucleotide
aattccatcatgagtgctcg

SEQ ID NO: 1796 - DNA, 20 bp, Artificial sequence
  Synthetic oligonucleotide
caattccatcatgagtgctc

SEQ ID NO: 1797 - DNA, 20 bp, Artificial sequence
  Synthetic oligonucleotide
gcaattccatcatgagtgct

SEQ ID NO: 1798 - DNA, 20 bp, Artificial sequence
  Synthetic oligonucleotide
ggcaattccatcatgagtgc

SEQ ID NO: 1799 - DNA, 20 bp, Artificial sequence
  Synthetic oligonucleotide
atactcaagtgtagcatagg

SEQ ID NO: 1800 - DNA, 20 bp, Artificial sequence
  Synthetic oligonucleotide
aatactcaagtgtagcatag

SEQ ID NO: 1801 - DNA, 20 bp, Artificial sequence
  Synthetic oligonucleotide
aaatactcaagtgtagcata

SEQ ID NO: 1802 - DNA, 20 bp, Artificial sequence
  Synthetic oligonucleotide
gaaatactcaagtgtagcat

SEQ ID NO: 1803 - DNA, 20 bp, Artificial sequence
  Synthetic oligonucleotide
tgaaatactcaagtgtagca

SEQ ID NO: 1804 - DNA, 20 bp, Artificial sequence
  Synthetic oligonucleotide
atgaaatactcaagtgtagc

SEQ ID NO: 1805 - DNA, 20 bp, Artificial sequence
  Synthetic oligonucleotide
gatgaaatactcaagtgtag

SEQ ID NO: 1806 - DNA, 20 bp, Artificial sequence
  Synthetic oligonucleotide
tgatgaaatactcaagtgta

SEQ ID NO: 1807 - DNA, 20 bp, Artificial sequence
  Synthetic oligonucleotide
ctgatgaaatactcaagtgt

SEQ ID NO: 1808 - DNA, 20 bp, Artificial sequence
  Synthetic oligonucleotide
tctgatgaaatactcaagtg

SEQ ID NO: 1809 - DNA, 20 bp, Artificial sequence
  Synthetic oligonucleotide
ctctgatgaaatactcaagt

SEQ ID NO: 1810 - DNA, 20 bp, Artificial sequence
  Synthetic oligonucleotide
tctctgatgaaatactcaag

SEQ ID NO: 1811 - DNA, 20 bp, Artificial sequence
  Synthetic oligonucleotide
atctctgatgaaatactcaa

SEQ ID NO: 1812 - DNA, 20 bp, Artificial sequence
  Synthetic oligonucleotide
acatctctgatgaaatactc

SEQ ID NO: 1813 - DNA, 20 bp, Artificial sequence
  Synthetic oligonucleotide
cacatctctgatgaaatact

SEQ ID NO: 1814 - DNA, 20 bp, Artificial sequence
  Synthetic oligonucleotide
tcacatctctgatgaaatac

SEQ ID NO: 1815 - DNA, 20 bp, Artificial sequence
  Synthetic oligonucleotide
ttcacatctctgatgaaata

SEQ ID NO: 1816 - DNA, 20 bp, Artificial sequence
  Synthetic oligonucleotide
tttcacatctctgatgaaat

SEQ ID NO: 1817 - DNA, 20 bp, Artificial sequence
  Synthetic oligonucleotide
gatttcacatctctgatgaa

SEQ ID NO: 1818 - DNA, 20 bp, Artificial sequence
  Synthetic oligonucleotide
ggatttcacatctctgatga

SEQ ID NO: 1819 - DNA, 20 bp, Artificial sequence
  Synthetic oligonucleotide
aggatttcacatctctgatg

SEQ ID NO: 1820 - DNA, 20 bp, Artificial sequence
  Synthetic oligonucleotide
aaggatttcacatctctgat

SEQ ID NO: 1821 - DNA, 20 bp, Artificial sequence
  Synthetic oligonucleotide
taaggatttcacatctctga

SEQ ID NO: 1822 - DNA, 20 bp, Artificial sequence
  Synthetic oligonucleotide
ttaaggatttcacatctctg

SEQ ID NO: 1823 - DNA, 20 bp, Artificial sequence
  Synthetic oligonucleotide
gttaaggatttcacatctct

SEQ ID NO: 1824 - DNA, 20 bp, Artificial sequence
  Synthetic oligonucleotide
ggttaaggatttcacatctc

SEQ ID NO: 1825 - DNA, 20 bp, Artificial sequence
  Synthetic oligonucleotide
gggttaaggatttcacatct

SEQ ID NO: 1826 - DNA, 20 bp, Artificial sequence
  Synthetic oligonucleotide
agggttaaggatttcacatc

SEQ ID NO: 1827 - DNA, 20 bp, Artificial sequence
  Synthetic oligonucleotide
cagggttaaggatttcacat

SEQ ID NO: 1828 - DNA, 20 bp, Artificial sequence
  Synthetic oligonucleotide
acagggttaaggatttcaca

SEQ ID NO: 1829 - DNA, 20 bp, Artificial sequence
  Synthetic oligonucleotide
aacagggttaaggatttcac

SEQ ID NO: 1830 - DNA, 20 bp, Artificial sequence
  Synthetic oligonucleotide
aaacagggttaaggatttca

SEQ ID NO: 1831 - DNA, 20 bp, Artificial sequence
  Synthetic oligonucleotide
caaacagggttaaggatttc

SEQ ID NO: 1832 - DNA, 20 bp, Artificial sequence
  Synthetic oligonucleotide
acaaacagggttaaggattt

SEQ ID NO: 1833 - DNA, 20 bp, Artificial sequence
  Synthetic oligonucleotide
gacaaacagggttaaggatt

SEQ ID NO: 1834 - DNA, 20 bp, Artificial sequence
  Synthetic oligonucleotide
tgacaaacagggttaaggat

SEQ ID NO: 1835 - DNA, 20 bp, Artificial sequence
  Synthetic oligonucleotide
gtgacaaacagggttaagga

SEQ ID NO: 1836 - DNA, 20 bp, Artificial sequence
  Synthetic oligonucleotide
ggtgacaaacagggttaagg

SEQ ID NO: 1837 - DNA, 20 bp, Artificial sequence
  Synthetic oligonucleotide
gggtgacaaacagggttaag

SEQ ID NO: 1838 - DNA, 20 bp, Artificial sequence
  Synthetic oligonucleotide
tgggtgacaaacagggttaa

SEQ ID NO: 1839 - DNA, 20 bp, Artificial sequence
  Synthetic oligonucleotide
atgggtgacaaacagggtta

SEQ ID NO: 1840 - DNA, 20 bp, Artificial sequence
  Synthetic oligonucleotide
aatgggtgacaaacagggtt

SEQ ID NO: 1841 - DNA, 20 bp, Artificial sequence
  Synthetic oligonucleotide
taatgggtgacaaacagggt

SEQ ID NO: 1842 - DNA, 20 bp, Artificial sequence
  Synthetic oligonucleotide
ataatgggtgacaaacaggg

SEQ ID NO: 1843 - DNA, 20 bp, Artificial sequence
  Synthetic oligonucleotide
gataatgggtgacaaacagg

SEQ ID NO: 1844 - DNA, 20 bp, Artificial sequence
  Synthetic oligonucleotide
ggataatgggtgacaaacag

SEQ ID NO: 1845 - DNA, 20 bp, Artificial sequence
  Synthetic oligonucleotide
cggataatgggtgacaaaca

SEQ ID NO: 1846 - DNA, 20 bp, Artificial sequence
  Synthetic oligonucleotide
gcggataatgggtgacaaac

SEQ ID NO: 1847 - DNA, 20 bp, Artificial sequence
  Synthetic oligonucleotide
ggcggataatgggtgacaaa

SEQ ID NO: 1848 - DNA, 20 bp, Artificial sequence
  Synthetic oligonucleotide
tggcggataatgggtgacaa

SEQ ID NO: 1849 - DNA, 20 bp, Artificial sequence
  Synthetic oligonucleotide
ctggcggataatgggtgaca

SEQ ID NO: 1850 - DNA, 20 bp, Artificial sequence
  Synthetic oligonucleotide
actggcggataatgggtgac

SEQ ID NO: 1851 - DNA, 20 bp, Artificial sequence
  Synthetic oligonucleotide
aactggcggataatgggtga

SEQ ID NO: 1852 - DNA, 20 bp, Artificial sequence
  Synthetic oligonucleotide
aaactggcggataatgggtg

SEQ ID NO: 1853 - DNA, 20 bp, Artificial sequence
  Synthetic oligonucleotide
caaactggcggataatgggt

SEQ ID NO: 1854 - DNA, 20 bp, Artificial sequence
  Synthetic oligonucleotide
acaaactggcggataatggg

SEQ ID NO: 1855 - DNA, 20 bp, Artificial sequence
  Synthetic oligonucleotide
cacaaactggcggataatgg

SEQ ID NO: 1856 - DNA, 20 bp, Artificial sequence
  Synthetic oligonucleotide
tcacaaactggcggataatg

SEQ ID NO: 1857 - DNA, 20 bp, Artificial sequence
  Synthetic oligonucleotide
ttcacaaactggcggataat

SEQ ID NO: 1858 - DNA, 20 bp, Artificial sequence
  Synthetic oligonucleotide
gttcacaaactggcggataa

SEQ ID NO: 1859 - DNA, 20 bp, Artificial sequence
  Synthetic oligonucleotide
acctggtgtgagtaattttt

SEQ ID NO: 1860 - DNA, 20 bp, Artificial sequence
  Synthetic oligonucleotide
ggtaattccccacctggtgt

SEQ ID NO: 1861 - DNA, 20 bp, Artificial sequence
  Synthetic oligonucleotide
tggtaattccccacctggtg

SEQ ID NO: 1862 - DNA, 20 bp, Artificial sequence
  Synthetic oligonucleotide
tcccatgtggtaattcccca

SEQ ID NO: 1863 - DNA, 20 bp, Artificial sequence
  Synthetic oligonucleotide
atcccatgtggtaattcccc

SEQ ID NO: 1864 - DNA, 20 bp, Artificial sequence
  Synthetic oligonucleotide
aatcccatgtggtaattccc

SEQ ID NO: 1865 - DNA, 20 bp, Artificial sequence
  Synthetic oligonucleotide
gaatcccatgtggtaattcc

SEQ ID NO: 1866 - DNA, 20 bp, Artificial sequence
  Synthetic oligonucleotide
agaatcccatgtggtaattc

SEQ ID NO: 1867 - DNA, 20 bp, Artificial sequence
  Synthetic oligonucleotide
aagaatcccatgtggtaatt

SEQ ID NO: 1868 - DNA, 20 bp, Artificial sequence
  Synthetic oligonucleotide
caagaatcccatgtggtaat

SEQ ID NO: 1869 - DNA, 20 bp, Artificial sequence
  Synthetic oligonucleotide
ccaagaatcccatgtggtaa

SEQ ID NO: 1870 - DNA, 20 bp, Artificial sequence
  Synthetic oligonucleotide
tgaccaagaatcccatgtgg

SEQ ID NO: 1871 - DNA, 20 bp, Artificial sequence
  Synthetic oligonucleotide
ctgaccaagaatcccatgtg

SEQ ID NO: 1872 - DNA, 20 bp, Artificial sequence
  Synthetic oligonucleotide
actgaccaagaatcccatgt

SEQ ID NO: 1873 - DNA, 20 bp, Artificial sequence
  Synthetic oligonucleotide
cactgaccaagaatcccatg

SEQ ID NO: 1874 - DNA, 20 bp, Artificial sequence
  Synthetic oligonucleotide
tcactgaccaagaatcccat

SEQ ID NO: 1875 - DNA, 20 bp, Artificial sequence
  Synthetic oligonucleotide
ctcactgaccaagaatccca

SEQ ID NO: 1876 - DNA, 20 bp, Artificial sequence
  Synthetic oligonucleotide
cctcactgaccaagaatccc

SEQ ID NO: 1877 - DNA, 20 bp, Artificial sequence
  Synthetic oligonucleotide
tcctcactgaccaagaatcc

SEQ ID NO: 1878 - DNA, 20 bp, Artificial sequence
  Synthetic oligonucleotide
atcctcactgaccaagaatc

SEQ ID NO: 1879 - DNA, 20 bp, Artificial sequence
  Synthetic oligonucleotide
catcctcactgaccaagaat

SEQ ID NO: 1880 - DNA, 20 bp, Artificial sequence
  Synthetic oligonucleotide
tcatcctcactgaccaagaa

SEQ ID NO: 1881 - DNA, 20 bp, Artificial sequence
  Synthetic oligonucleotide
ttcatcctcactgaccaaga

SEQ ID NO: 1882 - DNA, 20 bp, Artificial sequence
  Synthetic oligonucleotide
tttcatcctcactgaccaag

SEQ ID NO: 1883 - DNA, 20 bp, Artificial sequence
  Synthetic oligonucleotide
ctttcatcctcactgaccaa

SEQ ID NO: 1884 - DNA, 20 bp, Artificial sequence
  Synthetic oligonucleotide
gctttcatcctcactgacca

SEQ ID NO: 1885 - DNA, 20 bp, Artificial sequence
  Synthetic oligonucleotide
tgctttcatcctcactgacc

SEQ ID NO: 1886 - DNA, 20 bp, Artificial sequence
  Synthetic oligonucleotide
ttgctttcatcctcactgac

SEQ ID NO: 1887 - DNA, 20 bp, Artificial sequence
  Synthetic oligonucleotide
tttgctttcatcctcactga

SEQ ID NO: 1888 - DNA, 20 bp, Artificial sequence
  Synthetic oligonucleotide
gtttgctttcatcctcactg

SEQ ID NO: 1889 - DNA, 20 bp, Artificial sequence
  Synthetic oligonucleotide
agtttgctttcatcctcact

SEQ ID NO: 1890 - DNA, 20 bp, Artificial sequence
  Synthetic oligonucleotide
cagtttgctttcatcctcac

SEQ ID NO: 1891 - DNA, 20 bp, Artificial sequence
  Synthetic oligonucleotide
ccagtttgctttcatcctca

SEQ ID NO: 1892 - DNA, 20 bp, Artificial sequence
  Synthetic oligonucleotide
tccagtttgctttcatcctc

SEQ ID NO: 1893 - DNA, 20 bp, Artificial sequence
  Synthetic oligonucleotide
atccagtttgctttcatcct

SEQ ID NO: 1894 - DNA, 20 bp, Artificial sequence
  Synthetic oligonucleotide
gatccagtttgctttcatcc

SEQ ID NO: 1895 - DNA, 20 bp, Artificial sequence
  Synthetic oligonucleotide
ggatccagtttgctttcatc

SEQ ID NO: 1896 - DNA, 20 bp, Artificial sequence
  Synthetic oligonucleotide
tggatccagtttgctttcat

SEQ ID NO: 1897 - DNA, 20 bp, Artificial sequence
  Synthetic oligonucleotide
ttgttctgctgcgcctggat

SEQ ID NO: 1898 - DNA, 20 bp, Artificial sequence
  Synthetic oligonucleotide
tcagggacttgttctgctgc

SEQ ID NO: 1899 - DNA, 20 bp, Artificial sequence
  Synthetic oligonucleotide
atcagggacttgttctgctg

SEQ ID NO: 1900 - DNA, 20 bp, Artificial sequence
  Synthetic oligonucleotide
aatcagggacttgttctgct

SEQ ID NO: 1901 - DNA, 20 bp, Artificial sequence
  Synthetic oligonucleotide
aaatcagggacttgttctgc

SEQ ID NO: 1902 - DNA, 20 bp, Artificial sequence
  Synthetic oligonucleotide
aaaatcagggacttgttctg

SEQ ID NO: 1903 - DNA, 20 bp, Artificial sequence
  Synthetic oligonucleotide
caaaatcagggacttgttct

SEQ ID NO: 1904 - DNA, 20 bp, Artificial sequence
  Synthetic oligonucleotide
acaaaatcagggacttgttc

SEQ ID NO: 1905 - DNA, 20 bp, Artificial sequence
  Synthetic oligonucleotide
gacaaaatcagggacttgtt

SEQ ID NO: 1906 - DNA, 20 bp, Artificial sequence
  Synthetic oligonucleotide
tgacaaaatcagggacttgt

SEQ ID NO: 1907 - DNA, 20 bp, Artificial sequence
  Synthetic oligonucleotide
gtgacaaaatcagggacttg

SEQ ID NO: 1908 - DNA, 20 bp, Artificial sequence
  Synthetic oligonucleotide
ggtgacaaaatcagggactt

SEQ ID NO: 1909 - DNA, 20 bp, Artificial sequence
  Synthetic oligonucleotide
aggtgacaaaatcagggact

SEQ ID NO: 1910 - DNA, 20 bp, Artificial sequence
  Synthetic oligonucleotide
aaggtgacaaaatcagggac

SEQ ID NO: 1911 - DNA, 20 bp, Artificial sequence
  Synthetic oligonucleotide
gaaggtgacaaaatcaggga

SEQ ID NO: 1912 - DNA, 20 bp, Artificial sequence
  Synthetic oligonucleotide
ggaaggtgacaaaatcaggg

SEQ ID NO: 1913 - DNA, 20 bp, Artificial sequence
  Synthetic oligonucleotide
aggaaggtgacaaaatcagg

SEQ ID NO: 1914 - DNA, 20 bp, Artificial sequence
  Synthetic oligonucleotide
aaggaaggtgacaaaatcag

SEQ ID NO: 1915 - DNA, 20 bp, Artificial sequence
  Synthetic oligonucleotide
aaaggaaggtgacaaaatca

SEQ ID NO: 1916 - DNA, 20 bp, Artificial sequence
  Synthetic oligonucleotide
taaaggaaggtgacaaaatc

SEQ ID NO: 1917 - DNA, 20 bp, Artificial sequence
  Synthetic oligonucleotide
gtaaaggaaggtgacaaaat

SEQ ID NO: 1918 - DNA, 20 bp, Artificial sequence
  Synthetic oligonucleotide
ggtaaaggaaggtgacaaaa

SEQ ID NO: 1919 - DNA, 20 bp, Artificial sequence
  Synthetic oligonucleotide
tggtaaaggaaggtgacaaa

SEQ ID NO: 1920 - DNA, 20 bp, Artificial sequence
  Synthetic oligonucleotide
ttggtaaaggaaggtgacaa

SEQ ID NO: 1921 - DNA, 20 bp, Artificial sequence
  Synthetic oligonucleotide
tttggtaaaggaaggtgaca

SEQ ID NO: 1922 - DNA, 20 bp, Artificial sequence
  Synthetic oligonucleotide
atttggtaaaggaaggtgac

SEQ ID NO: 1923 - DNA, 20 bp, Artificial sequence
  Synthetic oligonucleotide
tatttggtaaaggaaggtga

SEQ ID NO: 1924 - DNA, 20 bp, Artificial sequence
  Synthetic oligonucleotide
ttatttggtaaaggaaggtg

SEQ ID NO: 1925 - DNA, 20 bp, Artificial sequence
  Synthetic oligonucleotide
gttatttggtaaaggaaggt

SEQ ID NO: 1926 - DNA, 20 bp, Artificial sequence
  Synthetic oligonucleotide
agttatttggtaaaggaagg

SEQ ID NO: 1927 - DNA, 20 bp, Artificial sequence
  Synthetic oligonucleotide
tagttatttggtaaaggaag

SEQ ID NO: 1928 - DNA, 20 bp, Artificial sequence
  Synthetic oligonucleotide
ctagttatttggtaaaggaa

SEQ ID NO: 1929 - DNA, 20 bp, Artificial sequence
  Synthetic oligonucleotide
tctagttatttggtaaagga

SEQ ID NO: 1930 - DNA, 20 bp, Artificial sequence
  Synthetic oligonucleotide
ctctagttatttggtaaagg

SEQ ID NO: 1931 - DNA, 20 bp, Artificial sequence
  Synthetic oligonucleotide
cctctagttatttggtaaag

SEQ ID NO: 1932 - DNA, 20 bp, Artificial sequence
  Synthetic oligonucleotide
tcctctagttatttggtaaa

SEQ ID NO: 1933 - DNA, 20 bp, Artificial sequence
  Synthetic oligonucleotide
ttcctctagttatttggtaa

SEQ ID NO: 1934 - DNA, 20 bp, Artificial sequence
  Synthetic oligonucleotide
attcctctagttatttggta

SEQ ID NO: 1935 - DNA, 20 bp, Artificial sequence
  Synthetic oligonucleotide
aattcctctagttatttggt

SEQ ID NO: 1936 - DNA, 20 bp, Artificial sequence
  Synthetic oligonucleotide
caattcctctagttatttgg

SEQ ID NO: 1937 - DNA, 20 bp, Artificial sequence
  Synthetic oligonucleotide
gcaattcctctagttatttg

SEQ ID NO: 1938 - DNA, 20 bp, Artificial sequence
  Synthetic oligonucleotide
tgcaattcctctagttattt

SEQ ID NO: 1939 - DNA, 20 bp, Artificial sequence
  Synthetic oligonucleotide
ctgcaattcctctagttatt

SEQ ID NO: 1940 - DNA, 20 bp, Artificial sequence
  Synthetic oligonucleotide
gctgcaattcctctagttat

SEQ ID NO: 1941 - DNA, 20 bp, Artificial sequence
  Synthetic oligonucleotide
tgctgcaattcctctagtta

SEQ ID NO: 1942 - DNA, 20 bp, Artificial sequence
  Synthetic oligonucleotide
ttgctgcaattcctctagtt

SEQ ID NO: 1943 - DNA, 20 bp, Artificial sequence
  Synthetic oligonucleotide
cttgctgcaattcctctagt

SEQ ID NO: 1944 - DNA, 20 bp, Artificial sequence
  Synthetic oligonucleotide
ccttgctgcaattcctctag

SEQ ID NO: 1945 - DNA, 20 bp, Artificial sequence
  Synthetic oligonucleotide
tccttgctgcaattcctcta

SEQ ID NO: 1946 - DNA, 20 bp, Artificial sequence
  Synthetic oligonucleotide
ctccttgctgcaattcctct

SEQ ID NO: 1947 - DNA, 20 bp, Artificial sequence
  Synthetic oligonucleotide
actccttgctgcaattcctc

SEQ ID NO: 1948 - DNA, 20 bp, Artificial sequence
  Synthetic oligonucleotide
aactccttgctgcaattcct

SEQ ID NO: 1949 - DNA, 20 bp, Artificial sequence
  Synthetic oligonucleotide
taactccttgctgcaattcc

SEQ ID NO: 1950 - DNA, 20 bp, Artificial sequence
  Synthetic oligonucleotide
ataactccttgctgcaattc

SEQ ID NO: 1951 - DNA, 20 bp, Artificial sequence
  Synthetic oligonucleotide
cataactccttgctgcaatt

SEQ ID NO: 1952 - DNA, 20 bp, Artificial sequence
  Synthetic oligonucleotide
ccataactccttgctgcaat

SEQ ID NO: 1953 - DNA, 20 bp, Artificial sequence
  Synthetic oligonucleotide
tccataactccttgctgcaa

SEQ ID NO: 1954 - DNA, 20 bp, Artificial sequence
  Synthetic oligonucleotide
atccataactccttgctgca

SEQ ID NO: 1955 - DNA, 20 bp, Artificial sequence
  Synthetic oligonucleotide
aatccataactccttgctgc

SEQ ID NO: 1956 - DNA, 20 bp, Artificial sequence
  Synthetic oligonucleotide
taatccataactccttgctg

SEQ ID NO: 1957 - DNA, 20 bp, Artificial sequence
  Synthetic oligonucleotide
ttaatccataactccttgct

SEQ ID NO: 1958 - DNA, 20 bp, Artificial sequence
  Synthetic oligonucleotide
tttaatccataactccttgc

SEQ ID NO: 1959 - DNA, 20 bp, Artificial sequence
  Synthetic oligonucleotide
atttaatccataactccttg

SEQ ID NO: 1960 - DNA, 20 bp, Artificial sequence
  Synthetic oligonucleotide
catttaatccataactcctt

SEQ ID NO: 1961 - DNA, 20 bp, Artificial sequence
  Synthetic oligonucleotide
acatttaatccataactcct

SEQ ID NO: 1962 - DNA, 20 bp, Artificial sequence
  Synthetic oligonucleotide
cacatttaatccataactcc

SEQ ID NO: 1963 - DNA, 20 bp, Artificial sequence
  Synthetic oligonucleotide
ccacatttaatccataactc

SEQ ID NO: 1964 - DNA, 20 bp, Artificial sequence
  Synthetic oligonucleotide
gccacatttaatccataact

SEQ ID NO: 1965 - DNA, 20 bp, Artificial sequence
  Synthetic oligonucleotide
agccacatttaatccataac

SEQ ID NO: 1966 - DNA, 20 bp, Artificial sequence
  Synthetic oligonucleotide
tagccacatttaatccataa

SEQ ID NO: 1967 - DNA, 20 bp, Artificial sequence
  Synthetic oligonucleotide
ttagccacatttaatccata

SEQ ID NO: 1968 - DNA, 20 bp, Artificial sequence
  Synthetic oligonucleotide
tttagccacatttaatccat

SEQ ID NO: 1969 - DNA, 20 bp, Artificial sequence
  Synthetic oligonucleotide
gtttagccacatttaatcca

SEQ ID NO: 1970 - DNA, 20 bp, Artificial sequence
  Synthetic oligonucleotide
agtttagccacatttaatcc

SEQ ID NO: 1971 - DNA, 20 bp, Artificial sequence
  Synthetic oligonucleotide
tagtttagccacatttaatc

SEQ ID NO: 1972 - DNA, 20 bp, Artificial sequence
  Synthetic oligonucleotide
ctagtttagccacatttaat

SEQ ID NO: 1973 - DNA, 20 bp, Artificial sequence
  Synthetic oligonucleotide
aggaacatctgctagtttag

SEQ ID NO: 1974 - DNA, 20 bp, Artificial sequence
  Synthetic oligonucleotide
caggaacatctgctagttta

SEQ ID NO: 1975 - DNA, 20 bp, Artificial sequence
  Synthetic oligonucleotide
ccaggaacatctgctagttt

SEQ ID NO: 1976 - DNA, 20 bp, Artificial sequence
  Synthetic oligonucleotide
tccaggaacatctgctagtt

SEQ ID NO: 1977 - DNA, 20 bp, Artificial sequence
  Synthetic oligonucleotide
ctccaggaacatctgctagt

SEQ ID NO: 1978 - DNA, 20 bp, Artificial sequence
  Synthetic oligonucleotide
tctccaggaacatctgctag

SEQ ID NO: 1979 - DNA, 20 bp, Artificial sequence
  Synthetic oligonucleotide
ttctccaggaacatctgcta

SEQ ID NO: 1980 - DNA, 20 bp, Artificial sequence
  Synthetic oligonucleotide
tttctccaggaacatctgct

SEQ ID NO: 1981 - DNA, 20 bp, Artificial sequence
  Synthetic oligonucleotide
atttctccaggaacatctgc

SEQ ID NO: 1982 - DNA, 20 bp, Artificial sequence
  Synthetic oligonucleotide
aatttctccaggaacatctg

SEQ ID NO: 1983 - DNA, 20 bp, Artificial sequence
  Synthetic oligonucleotide
aaatttctccaggaacatct

SEQ ID NO: 1984 - DNA, 20 bp, Artificial sequence
  Synthetic oligonucleotide
aaaatttctccaggaacatc

SEQ ID NO: 1985 - DNA, 20 bp, Artificial sequence
  Synthetic oligonucleotide
caaaatttctccaggaacat

SEQ ID NO: 1986 - DNA, 20 bp, Artificial sequence
  Synthetic oligonucleotide
tcaaaatttctccaggaaca

SEQ ID NO: 1987 - DNA, 20 bp, Artificial sequence
  Synthetic oligonucleotide
ttcaaaatttctccaggaac

SEQ ID NO: 1988 - DNA, 20 bp, Artificial sequence
  Synthetic oligonucleotide
cttcaaaatttctccaggaa

SEQ ID NO: 1989 - DNA, 20 bp, Artificial sequence
  Synthetic oligonucleotide
tcttcaaaatttctccagga

SEQ ID NO: 1990 - DNA, 20 bp, Artificial sequence
  Synthetic oligonucleotide
ttcttcaaaatttctccagg

SEQ ID NO: 1991 - DNA, 20 bp, Artificial sequence
  Synthetic oligonucleotide
tttcttcaaaatttctccag

SEQ ID NO: 1992 - DNA, 20 bp, Artificial sequence
  Synthetic oligonucleotide
ctttcttcaaaatttctcca

SEQ ID NO: 1993 - DNA, 20 bp, Artificial sequence
  Synthetic oligonucleotide
gctttcttcaaaatttctcc

SEQ ID NO: 1994 - DNA, 20 bp, Artificial sequence
  Synthetic oligonucleotide
tgctttcttcaaaatttctc

SEQ ID NO: 1995 - DNA, 20 bp, Artificial sequence
  Synthetic oligonucleotide
ctgctttcttcaaaatttct

SEQ ID NO: 1996 - DNA, 20 bp, Artificial sequence
  Synthetic oligonucleotide
gctgctttcttcaaaatttc

SEQ ID NO: 1997 - DNA, 20 bp, Artificial sequence
  Synthetic oligonucleotide
agctgctttcttcaaaattt

SEQ ID NO: 1998 - DNA, 20 bp, Artificial sequence
  Synthetic oligonucleotide
gagctgctttcttcaaaatt

SEQ ID NO: 1999 - DNA, 20 bp, Artificial sequence
  Synthetic oligonucleotide
tgagctgctttcttcaaaat

SEQ ID NO: 2000 - DNA, 20 bp, Artificial sequence
  Synthetic oligonucleotide
gtgagctgctttcttcaaaa

SEQ ID NO: 2001 - DNA, 20 bp, Artificial sequence
  Synthetic oligonucleotide
tgtgagctgctttcttcaaa

SEQ ID NO: 2002 - DNA, 20 bp, Artificial sequence
  Synthetic oligonucleotide
ttgtgagctgctttcttcaa

SEQ ID NO: 2003 - DNA, 20 bp, Artificial sequence
  Synthetic oligonucleotide
cttgtgagctgctttcttca

SEQ ID NO: 2004 - DNA, 20 bp, Artificial sequence
  Synthetic oligonucleotide
acttgtgagctgctttcttc

SEQ ID NO: 2005 - DNA, 20 bp, Artificial sequence
  Synthetic oligonucleotide
gacttgtgagctgctttctt

SEQ ID NO: 2006 - DNA, 20 bp, Artificial sequence
  Synthetic oligonucleotide
tgacttgtgagctgctttct

SEQ ID NO: 2007 - DNA, 20 bp, Artificial sequence
  Synthetic oligonucleotide
ttgacttgtgagctgctttc

SEQ ID NO: 2008 - DNA, 20 bp, Artificial sequence
  Synthetic oligonucleotide
tttgacttgtgagctgcttt

SEQ ID NO: 2009 - DNA, 20 bp, Artificial sequence
  Synthetic oligonucleotide
ttttgacttgtgagctgctt

SEQ ID NO: 2010 - DNA, 20 bp, Artificial sequence
  Synthetic oligonucleotide
cttttgacttgtgagctgct

SEQ ID NO: 2011 - DNA, 20 bp, Artificial sequence
  Synthetic oligonucleotide
tcttttgacttgtgagctgc

SEQ ID NO: 2012 - DNA, 20 bp, Artificial sequence
  Synthetic oligonucleotide
ctcttttgacttgtgagctg

SEQ ID NO: 2013 - DNA, 20 bp, Artificial sequence
  Synthetic oligonucleotide
cagctcttttgacttgtgag

SEQ ID NO: 2014 - DNA, 20 bp, Artificial sequence
  Synthetic oligonucleotide
ccagctcttttgacttgtga

SEQ ID NO: 2015 - DNA, 20 bp, Artificial sequence
  Synthetic oligonucleotide
tccagctcttttgacttgtg

SEQ ID NO: 2016 - DNA, 20 bp, Artificial sequence
  Synthetic oligonucleotide
ttccagctcttttgacttgt

SEQ ID NO: 2017 - DNA, 20 bp, Artificial sequence
  Synthetic oligonucleotide
cttccagctcttttgacttg

SEQ ID NO: 2018 - DNA, 20 bp, Artificial sequence
  Synthetic oligonucleotide
ccttccagctcttttgactt

SEQ ID NO: 2019 - DNA, 20 bp, Artificial sequence
  Synthetic oligonucleotide
tccttccagctcttttgact

SEQ ID NO: 2020 - DNA, 20 bp, Artificial sequence
  Synthetic oligonucleotide
atccttccagctcttttgac

SEQ ID NO: 2021 - DNA, 20 bp, Artificial sequence
  Synthetic oligonucleotide
aatccttccagctcttttga

SEQ ID NO: 2022 - DNA, 20 bp, Artificial sequence
  Synthetic oligonucleotide
taatccttccagctcttttg

SEQ ID NO: 2023 - DNA, 20 bp, Artificial sequence
  Synthetic oligonucleotide
ttaatccttccagctctttt

SEQ ID NO: 2024 - DNA, 20 bp, Artificial sequence
  Synthetic oligonucleotide
attaatccttccagctcttt

SEQ ID NO: 2025 - DNA, 20 bp, Artificial sequence
  Synthetic oligonucleotide
tattaatccttccagctctt

SEQ ID NO: 2026 - DNA, 20 bp, Artificial sequence
  Synthetic oligonucleotide
ttattaatccttccagctct

SEQ ID NO: 2027 - DNA, 20 bp, Artificial sequence
  Synthetic oligonucleotide
tttattaatccttccagctc

SEQ ID NO: 2028 - DNA, 20 bp, Artificial sequence
  Synthetic oligonucleotide
atttattaatccttccagct

SEQ ID NO: 2029 - DNA, 20 bp, Artificial sequence
  Synthetic oligonucleotide
tatttattaatccttccagc

SEQ ID NO: 2030 - DNA, 20 bp, Artificial sequence
  Synthetic oligonucleotide
gtatttattaatccttccag

SEQ ID NO: 2031 - DNA, 20 bp, Artificial sequence
  Synthetic oligonucleotide
cgtatttattaatccttcca

SEQ ID NO: 2032 - DNA, 20 bp, Artificial sequence
  Synthetic oligonucleotide
tcgtatttattaatccttcc

SEQ ID NO: 2033 - DNA, 20 bp, Artificial sequence
  Synthetic oligonucleotide
ttcgtatttattaatccttc

SEQ ID NO: 2034 - DNA, 20 bp, Artificial sequence
  Synthetic oligonucleotide
cttttcgtatttattaatcc

SEQ ID NO: 2035 - DNA, 20 bp, Artificial sequence
  Synthetic oligonucleotide
ctctttcttttcgtatttat

SEQ ID NO: 2036 - DNA, 20 bp, Artificial sequence
  Synthetic oligonucleotide
tctctttcttttcgtattta

SEQ ID NO: 2037 - DNA, 20 bp, Artificial sequence
  Synthetic oligonucleotide
gtctctttcttttcgtattt

SEQ ID NO: 2038 - DNA, 20 bp, Artificial sequence
  Synthetic oligonucleotide
agtctctttcttttcgtatt

SEQ ID NO: 2039 - DNA, 20 bp, Artificial sequence
  Synthetic oligonucleotide
gagtctctttcttttcgtat

SEQ ID NO: 2040 - DNA, 20 bp, Artificial sequence
  Synthetic oligonucleotide
tgagtctctttcttttcgta

SEQ ID NO: 2041 - DNA, 20 bp, Artificial sequence
  Synthetic oligonucleotide
ttgagtctctttcttttcgt

SEQ ID NO: 2042 - DNA, 20 bp, Artificial sequence
  Synthetic oligonucleotide
cttgagtctctttcttttcg

SEQ ID NO: 2043 - DNA, 20 bp, Artificial sequence
  Synthetic oligonucleotide
acttgagtctctttcttttc

SEQ ID NO: 2044 - DNA, 20 bp, Artificial sequence
  Synthetic oligonucleotide
tacttgagtctctttctttt

SEQ ID NO: 2045 - DNA, 20 bp, Artificial sequence
  Synthetic oligonucleotide
atacttgagtctctttcttt

SEQ ID NO: 2046 - DNA, 20 bp, Artificial sequence
  Synthetic oligonucleotide
aatacttgagtctctttctt

SEQ ID NO: 2047 - DNA, 20 bp, Artificial sequence
  Synthetic oligonucleotide
aaatacttgagtctctttct

SEQ ID NO: 2048 - DNA, 20 bp, Artificial sequence
  Synthetic oligonucleotide
aaaatacttgagtctctttc

SEQ ID NO: 2049 - DNA, 20 bp, Artificial sequence
  Synthetic oligonucleotide
caaaatacttgagtctcttt

SEQ ID NO: 2050 - DNA, 20 bp, Artificial sequence
  Synthetic oligonucleotide
gcaaaatacttgagtctctt

SEQ ID NO: 2051 - DNA, 20 bp, Artificial sequence
  Synthetic oligonucleotide
tgcaaaatacttgagtctct

SEQ ID NO: 2052 - DNA, 20 bp, Artificial sequence
  Synthetic oligonucleotide
ttgcaaaatacttgagtctc

SEQ ID NO: 2053 - DNA, 20 bp, Artificial sequence
  Synthetic oligonucleotide
tttgcaaaatacttgagtct

SEQ ID NO: 2054 - DNA, 20 bp, Artificial sequence
  Synthetic oligonucleotide
ctttgcaaaatacttgagtc

SEQ ID NO: 2055 - DNA, 20 bp, Artificial sequence
  Synthetic oligonucleotide
actttgcaaaatacttgagt

SEQ ID NO: 2056 - DNA, 20 bp, Artificial sequence
  Synthetic oligonucleotide
aactttgcaaaatacttgag

SEQ ID NO: 2057 - DNA, 20 bp, Artificial sequence
  Synthetic oligonucleotide
taactttgcaaaatacttga

SEQ ID NO: 2058 - DNA, 20 bp, Artificial sequence
  Synthetic oligonucleotide
ataactttgcaaaatacttg

SEQ ID NO: 2059 - DNA, 20 bp, Artificial sequence
  Synthetic oligonucleotide
cataactttgcaaaatactt

SEQ ID NO: 2060 - DNA, 20 bp, Artificial sequence
  Synthetic oligonucleotide
ccataactttgcaaaatact

SEQ ID NO: 2061 - DNA, 20 bp, Artificial sequence
  Synthetic oligonucleotide
tccataactttgcaaaatac

SEQ ID NO: 2062 - DNA, 20 bp, Artificial sequence
  Synthetic oligonucleotide
gtccataactttgcaaaata

SEQ ID NO: 2063 - DNA, 20 bp, Artificial sequence
  Synthetic oligonucleotide
cgtccataactttgcaaaat

SEQ ID NO: 2064 - DNA, 20 bp, Artificial sequence
  Synthetic oligonucleotide
tcgtccataactttgcaaaa

SEQ ID NO: 2065 - DNA, 20 bp, Artificial sequence
  Synthetic oligonucleotide
atcgtccataactttgcaaa

SEQ ID NO: 2066 - DNA, 20 bp, Artificial sequence
  Synthetic oligonucleotide
catcgtccataactttgcaa

SEQ ID NO: 2067 - DNA, 20 bp, Artificial sequence
  Synthetic oligonucleotide
gcatcgtccataactttgca

SEQ ID NO: 2068 - DNA, 20 bp, Artificial sequence
  Synthetic oligonucleotide
tgcatcgtccataactttgc

SEQ ID NO: 2069 - DNA, 20 bp, Artificial sequence
  Synthetic oligonucleotide
atgcatcgtccataactttg

SEQ ID NO: 2070 - DNA, 20 bp, Artificial sequence
  Synthetic oligonucleotide
tatgcatcgtccataacttt

SEQ ID NO: 2071 - DNA, 20 bp, Artificial sequence
  Synthetic oligonucleotide
ttatgcatcgtccataactt

SEQ ID NO: 2072 - DNA, 20 bp, Artificial sequence
  Synthetic oligonucleotide
attatgcatcgtccataact

SEQ ID NO: 2073 - DNA, 20 bp, Artificial sequence
  Synthetic oligonucleotide
cattatgcatcgtccataac

SEQ ID NO: 2074 - DNA, 20 bp, Artificial sequence
  Synthetic oligonucleotide
ccacttctgcaggtcttgtg

SEQ ID NO: 2075 - DNA, 20 bp, Artificial sequence
  Synthetic oligonucleotide
tccacttctgcaggtcttgt

SEQ ID NO: 2076 - DNA, 20 bp, Artificial sequence
  Synthetic oligonucleotide
gtccacttctgcaggtcttg

SEQ ID NO: 2077 - DNA, 20 bp, Artificial sequence
  Synthetic oligonucleotide
tgtccacttctgcaggtctt

SEQ ID NO: 2078 - DNA, 20 bp, Artificial sequence
  Synthetic oligonucleotide
ctgtccacttctgcaggtct

SEQ ID NO: 2079 - DNA, 20 bp, Artificial sequence
  Synthetic oligonucleotide
tctgtccacttctgcaggtc

SEQ ID NO: 2080 - DNA, 20 bp, Artificial sequence
  Synthetic oligonucleotide
ctctgtccacttctgcaggt

SEQ ID NO: 2081 - DNA, 20 bp, Artificial sequence
  Synthetic oligonucleotide
tcctctgtccacttctgcag

SEQ ID NO: 2082 - DNA, 20 bp, Artificial sequence
  Synthetic oligonucleotide
ctcctctgtccacttctgca

SEQ ID NO: 2083 - DNA, 20 bp, Artificial sequence
  Synthetic oligonucleotide
actcctctgtccacttctgc

SEQ ID NO: 2084 - DNA, 20 bp, Artificial sequence
  Synthetic oligonucleotide
aactcctctgtccacttctg

SEQ ID NO: 2085 - DNA, 20 bp, Artificial sequence
  Synthetic oligonucleotide
gaactcctctgtccacttct

SEQ ID NO: 2086 - DNA, 20 bp, Artificial sequence
  Synthetic oligonucleotide
tgaactcctctgtccacttc

SEQ ID NO: 2087 - DNA, 20 bp, Artificial sequence
  Synthetic oligonucleotide
ttgaactcctctgtccactt

SEQ ID NO: 2088 - DNA, 20 bp, Artificial sequence
  Synthetic oligonucleotide
gttgaactcctctgtccact

SEQ ID NO: 2089 - DNA, 20 bp, Artificial sequence
  Synthetic oligonucleotide
tgttgaactcctctgtccac

SEQ ID NO: 2090 - DNA, 20 bp, Artificial sequence
  Synthetic oligonucleotide
atgttgaactcctctgtcca

SEQ ID NO: 2091 - DNA, 20 bp, Artificial sequence
  Synthetic oligonucleotide
catgttgaactcctctgtcc

SEQ ID NO: 2092 - DNA, 20 bp, Artificial sequence
  Synthetic oligonucleotide
ccatgttgaactcctctgtc

SEQ ID NO: 2093 - DNA, 20 bp, Artificial sequence
  Synthetic oligonucleotide
tccatgttgaactcctctgt

SEQ ID NO: 2094 - DNA, 20 bp, Artificial sequence
  Synthetic oligonucleotide
ttccatgttgaactcctctg

SEQ ID NO: 2095 - DNA, 20 bp, Artificial sequence
  Synthetic oligonucleotide
cttccatgttgaactcctct

SEQ ID NO: 2096 - DNA, 20 bp, Artificial sequence
  Synthetic oligonucleotide
tcttccatgttgaactcctc

SEQ ID NO: 2097 - DNA, 20 bp, Artificial sequence
  Synthetic oligonucleotide
ttcttccatgttgaactcct

SEQ ID NO: 2098 - DNA, 20 bp, Artificial sequence
  Synthetic oligonucleotide
tttcttccatgttgaactcc

SEQ ID NO: 2099 - DNA, 20 bp, Artificial sequence
  Synthetic oligonucleotide
gtttcttccatgttgaactc

SEQ ID NO: 2100 - DNA, 20 bp, Artificial sequence
  Synthetic oligonucleotide
tgtttcttccatgttgaact

SEQ ID NO: 2101 - DNA, 20 bp, Artificial sequence
  Synthetic oligonucleotide
gtgtttcttccatgttgaac

SEQ ID NO: 2102 - DNA, 20 bp, Artificial sequence
  Synthetic oligonucleotide
tgtgtttcttccatgttgaa

SEQ ID NO: 2103 - DNA, 20 bp, Artificial sequence
  Synthetic oligonucleotide
ctgtgtttcttccatgttga

SEQ ID NO: 2104 - DNA, 20 bp, Artificial sequence
  Synthetic oligonucleotide
tctgtgtttcttccatgttg

SEQ ID NO: 2105 - DNA, 20 bp, Artificial sequence
  Synthetic oligonucleotide
gtctgtgtttcttccatgtt

SEQ ID NO: 2106 - DNA, 20 bp, Artificial sequence
  Synthetic oligonucleotide
agtctgtgtttcttccatgt

SEQ ID NO: 2107 - DNA, 20 bp, Artificial sequence
  Synthetic oligonucleotide
aagtctgtgtttcttccatg

SEQ ID NO: 2108 - DNA, 20 bp, Artificial sequence
  Synthetic oligonucleotide
gaagtctgtgtttcttccat

SEQ ID NO: 2109 - DNA, 20 bp, Artificial sequence
  Synthetic oligonucleotide
agaagtctgtgtttcttcca

SEQ ID NO: 2110 - DNA, 20 bp, Artificial sequence
  Synthetic oligonucleotide
gagaagtctgtgtttcttcc

SEQ ID NO: 2111 - DNA, 20 bp, Artificial sequence
  Synthetic oligonucleotide
aagagaagtctgtgtttctt

SEQ ID NO: 2112 - DNA, 20 bp, Artificial sequence
  Synthetic oligonucleotide
gaagagaagtctgtgtttct

SEQ ID NO: 2113 - DNA, 20 bp, Artificial sequence
  Synthetic oligonucleotide
agaagagaagtctgtgtttc

SEQ ID NO: 2114 - DNA, 20 bp, Artificial sequence
  Synthetic oligonucleotide
aagaagagaagtctgtgttt

SEQ ID NO: 2115 - DNA, 20 bp, Artificial sequence
  Synthetic oligonucleotide
gaagaagagaagtctgtgtt

SEQ ID NO: 2116 - DNA, 20 bp, Artificial sequence
  Synthetic oligonucleotide
tgaagaagagaagtctgtgt

SEQ ID NO: 2117 - DNA, 20 bp, Artificial sequence
  Synthetic oligonucleotide
atgaagaagagaagtctgtg

SEQ ID NO: 2118 - DNA, 20 bp, Artificial sequence
  Synthetic oligonucleotide
aatgaagaagagaagtctgt

SEQ ID NO: 2119 - DNA, 20 bp, Artificial sequence
  Synthetic oligonucleotide
taatgaagaagagaagtctg

SEQ ID NO: 2120 - DNA, 20 bp, Artificial sequence
  Synthetic oligonucleotide
ttaatgaagaagagaagtct

SEQ ID NO: 2121 - DNA, 20 bp, Artificial sequence
  Synthetic oligonucleotide
tttaatgaagaagagaagtc

SEQ ID NO: 2122 - DNA, 20 bp, Artificial sequence
  Synthetic oligonucleotide
ttttaatgaagaagagaagt

SEQ ID NO: 2123 - DNA, 20 bp, Artificial sequence
  Synthetic oligonucleotide
attttaatgaagaagagaag

SEQ ID NO: 2124 - DNA, 20 bp, Artificial sequence
  Synthetic oligonucleotide
tcacaaatgtagtcttcatt

SEQ ID NO: 2125 - DNA, 20 bp, Artificial sequence
  Synthetic oligonucleotide
ttcacaaatgtagtcttcat

SEQ ID NO: 2126 - DNA, 20 bp, Artificial sequence
  Synthetic oligonucleotide
gttcacaaatgtagtcttca

SEQ ID NO: 2127 - DNA, 20 bp, Artificial sequence
  Synthetic oligonucleotide
tgttcacaaatgtagtcttc

SEQ ID NO: 2128 - DNA, 20 bp, Artificial sequence
  Synthetic oligonucleotide
ttgttcacaaatgtagtctt

SEQ ID NO: 2129 - DNA, 20 bp, Artificial sequence
  Synthetic oligonucleotide
ggtatttttaattctccatt

SEQ ID NO: 2130 - DNA, 20 bp, Artificial sequence
  Synthetic oligonucleotide
tggtatttttaattctccat

SEQ ID NO: 2131 - DNA, 20 bp, Artificial sequence
  Synthetic oligonucleotide
ttggtatttttaattctcca

SEQ ID NO: 2132 - DNA, 20 bp, Artificial sequence
  Synthetic oligonucleotide
gttggtatttttaattctcc

SEQ ID NO: 2133 - DNA, 20 bp, Artificial sequence
  Synthetic oligonucleotide
agttggtatttttaattctc

SEQ ID NO: 2134 - DNA, 20 bp, Artificial sequence
  Synthetic oligonucleotide
cagttggtatttttaattct

SEQ ID NO: 2135 - DNA, 20 bp, Artificial sequence
  Synthetic oligonucleotide
acagttggtatttttaattc

SEQ ID NO: 2136 - DNA, 20 bp, Artificial sequence
  Synthetic oligonucleotide
gtacagttggtatttttaat

SEQ ID NO: 2137 - DNA, 20 bp, Artificial sequence
  Synthetic oligonucleotide
tgtacagttggtatttttaa

SEQ ID NO: 2138 - DNA, 20 bp, Artificial sequence
  Synthetic oligonucleotide
ttgtacagttggtattttta

SEQ ID NO: 2139 - DNA, 20 bp, Artificial sequence
  Synthetic oligonucleotide
tttgtacagttggtattttt

SEQ ID NO: 2140 - DNA, 20 bp, Artificial sequence
  Synthetic oligonucleotide
ttttgtacagttggtatttt

SEQ ID NO: 2141 - DNA, 20 bp, Artificial sequence
  Synthetic oligonucleotide
attttgtacagttggtattt

SEQ ID NO: 2142 - DNA, 20 bp, Artificial sequence
  Synthetic oligonucleotide
tattttgtacagttggtatt

SEQ ID NO: 2143 - DNA, 20 bp, Artificial sequence
  Synthetic oligonucleotide
ttattttgtacagttggtat

SEQ ID NO: 2144 - DNA, 20 bp, Artificial sequence
  Synthetic oligonucleotide
gttattttgtacagttggta

SEQ ID NO: 2145 - DNA, 20 bp, Artificial sequence
  Synthetic oligonucleotide
agttattttgtacagttggt

SEQ ID NO: 2146 - DNA, 20 bp, Artificial sequence
  Synthetic oligonucleotide
gagttattttgtacagttgg

SEQ ID NO: 2147 - DNA, 20 bp, Artificial sequence
  Synthetic oligonucleotide
agagttattttgtacagttg

SEQ ID NO: 2148 - DNA, 20 bp, Artificial sequence
  Synthetic oligonucleotide
gagagttattttgtacagtt

SEQ ID NO: 2149 - DNA, 20 bp, Artificial sequence
  Synthetic oligonucleotide
ggagagttattttgtacagt

SEQ ID NO: 2150 - DNA, 20 bp, Artificial sequence
  Synthetic oligonucleotide
tggagagttattttgtacag

SEQ ID NO: 2151 - DNA, 20 bp, Artificial sequence
  Synthetic oligonucleotide
ctggagagttattttgtaca

SEQ ID NO: 2152 - DNA, 20 bp, Artificial sequence
  Synthetic oligonucleotide
actggagagttattttgtac

SEQ ID NO: 2153 - DNA, 20 bp, Artificial sequence
  Synthetic oligonucleotide
tactggagagttattttgta

SEQ ID NO: 2154 - DNA, 20 bp, Artificial sequence
  Synthetic oligonucleotide
ttactggagagttattttgt

SEQ ID NO: 2155 - DNA, 20 bp, Artificial sequence
  Synthetic oligonucleotide
gttactggagagttattttg

SEQ ID NO: 2156 - DNA, 20 bp, Artificial sequence
  Synthetic oligonucleotide
tgttactggagagttatttt

SEQ ID NO: 2157 - DNA, 20 bp, Artificial sequence
  Synthetic oligonucleotide
ctgttactggagagttattt

SEQ ID NO: 2158 - DNA, 20 bp, Artificial sequence
  Synthetic oligonucleotide
gctgttactggagagttatt

SEQ ID NO: 2159 - DNA, 20 bp, Artificial sequence
  Synthetic oligonucleotide
ggctgttactggagagttat

SEQ ID NO: 2160 - DNA, 20 bp, Artificial sequence
  Synthetic oligonucleotide
aggctgttactggagagtta

SEQ ID NO: 2161 - DNA, 20 bp, Artificial sequence
  Synthetic oligonucleotide
taggctgttactggagagtt

SEQ ID NO: 2162 - DNA, 20 bp, Artificial sequence
  Synthetic oligonucleotide
ataggctgttactggagagt

SEQ ID NO: 2163 - DNA, 20 bp, Artificial sequence
  Synthetic oligonucleotide
gataggctgttactggagag

SEQ ID NO: 2164 - DNA, 20 bp, Artificial sequence
  Synthetic oligonucleotide
agataggctgttactggaga

SEQ ID NO: 2165 - DNA, 20 bp, Artificial sequence
  Synthetic oligonucleotide
aagataggctgttactggag

SEQ ID NO: 2166 - DNA, 20 bp, Artificial sequence
  Synthetic oligonucleotide
aaagataggctgttactgga

SEQ ID NO: 2167 - DNA, 20 bp, Artificial sequence
  Synthetic oligonucleotide
caaagataggctgttactgg

SEQ ID NO: 2168 - DNA, 20 bp, Artificial sequence
  Synthetic oligonucleotide
acaaagataggctgttactg

SEQ ID NO: 2169 - DNA, 20 bp, Artificial sequence
  Synthetic oligonucleotide
cacaaagataggctgttact

SEQ ID NO: 2170 - DNA, 20 bp, Artificial sequence
  Synthetic oligonucleotide
acacaaagataggctgttac

SEQ ID NO: 2171 - DNA, 20 bp, Artificial sequence
  Synthetic oligonucleotide
cacacaaagataggctgtta

SEQ ID NO: 2172 - DNA, 20 bp, Artificial sequence
  Synthetic oligonucleotide
tcacacaaagataggctgtt

SEQ ID NO: 2173 - DNA, 20 bp, Artificial sequence
  Synthetic oligonucleotide
gtcacacaaagataggctgt

SEQ ID NO: 2174 - DNA, 20 bp, Artificial sequence
  Synthetic oligonucleotide
tgtcacacaaagataggctg

SEQ ID NO: 2175 - DNA, 20 bp, Artificial sequence
  Synthetic oligonucleotide
atgtcacacaaagataggct

SEQ ID NO: 2176 - DNA, 20 bp, Artificial sequence
  Synthetic oligonucleotide
catgtcacacaaagataggc

SEQ ID NO: 2177 - DNA, 20 bp, Artificial sequence
  Synthetic oligonucleotide
acatgtcacacaaagatagg

SEQ ID NO: 2178 - DNA, 20 bp, Artificial sequence
  Synthetic oligonucleotide
cacatgtcacacaaagatag

SEQ ID NO: 2179 - DNA, 20 bp, Artificial sequence
  Synthetic oligonucleotide
tcacatgtcacacaaagata

SEQ ID NO: 2180 - DNA, 20 bp, Artificial sequence
  Synthetic oligonucleotide
ctcacatgtcacacaaagat

SEQ ID NO: 2181 - DNA, 20 bp, Artificial sequence
  Synthetic oligonucleotide
gctcacatgtcacacaaaga

SEQ ID NO: 2182 - DNA, 20 bp, Artificial sequence
  Synthetic oligonucleotide
tgctcacatgtcacacaaag

SEQ ID NO: 2183 - DNA, 20 bp, Artificial sequence
  Synthetic oligonucleotide
atgctcacatgtcacacaaa

SEQ ID NO: 2184 - DNA, 20 bp, Artificial sequence
  Synthetic oligonucleotide
tatgctcacatgtcacacaa

SEQ ID NO: 2185 - DNA, 20 bp, Artificial sequence
  Synthetic oligonucleotide
ttatgctcacatgtcacaca

SEQ ID NO: 2186 - DNA, 20 bp, Artificial sequence
  Synthetic oligonucleotide
tttatgctcacatgtcacac

SEQ ID NO: 2187 - DNA, 20 bp, Artificial sequence
  Synthetic oligonucleotide
ttttatgctcacatgtcaca

SEQ ID NO: 2188 - DNA, 20 bp, Artificial sequence
  Synthetic oligonucleotide
attttatgctcacatgtcac

SEQ ID NO: 2189 - DNA, 20 bp, Artificial sequence
  Synthetic oligonucleotide
aattttatgctcacatgtca

SEQ ID NO: 2190 - DNA, 20 bp, Artificial sequence
  Synthetic oligonucleotide
taattttatgctcacatgtc

SEQ ID NO: 2191 - DNA, 20 bp, Artificial sequence
  Synthetic oligonucleotide
ataattttatgctcacatgt

SEQ ID NO: 2192 - DNA, 20 bp, Artificial sequence
  Synthetic oligonucleotide
cataattttatgctcacatg

SEQ ID NO: 2193 - DNA, 20 bp, Artificial sequence
  Synthetic oligonucleotide
taccatggtcataattttat

SEQ ID NO: 2194 - DNA, 20 bp, Artificial sequence
  Synthetic oligonucleotide
ataccatggtcataatttta

SEQ ID NO: 2195 - DNA, 20 bp, Artificial sequence
  Synthetic oligonucleotide
tataccatggtcataatttt

SEQ ID NO: 2196 - DNA, 20 bp, Artificial sequence
  Synthetic oligonucleotide
atataccatggtcataattt

SEQ ID NO: 2197 - DNA, 20 bp, Artificial sequence
  Synthetic oligonucleotide
aatataccatggtcataatt

SEQ ID NO: 2198 - DNA, 20 bp, Artificial sequence
  Synthetic oligonucleotide
gaatataccatggtcataat

SEQ ID NO: 2199 - DNA, 20 bp, Artificial sequence
  Synthetic oligonucleotide
ggaatataccatggtcataa

SEQ ID NO: 2200 - DNA, 20 bp, Artificial sequence
  Synthetic oligonucleotide
aggaatataccatggtcata

SEQ ID NO: 2201 - DNA, 20 bp, Artificial sequence
  Synthetic oligonucleotide
taggaatataccatggtcat

SEQ ID NO: 2202 - DNA, 20 bp, Artificial sequence
  Synthetic oligonucleotide
ataggaatataccatggtca

SEQ ID NO: 2203 - DNA, 20 bp, Artificial sequence
  Synthetic oligonucleotide
aataggaatataccatggtc

SEQ ID NO: 2204 - DNA, 20 bp, Artificial sequence
  Synthetic oligonucleotide
caataggaatataccatggt

SEQ ID NO: 2205 - DNA, 20 bp, Artificial sequence
  Synthetic oligonucleotide
ccaataggaatataccatgg

SEQ ID NO: 2206 - DNA, 20 bp, Artificial sequence
  Synthetic oligonucleotide
acctctctgtttccaatagg

SEQ ID NO: 2207 - DNA, 20 bp, Artificial sequence
  Synthetic oligonucleotide
aacctctctgtttccaatag

SEQ ID NO: 2208 - DNA, 20 bp, Artificial sequence
  Synthetic oligonucleotide
aaacctctctgtttccaata

SEQ ID NO: 2209 - DNA, 20 bp, Artificial sequence
  Synthetic oligonucleotide
aaaacctctctgtttccaat

SEQ ID NO: 2210 - DNA, 20 bp, Artificial sequence
  Synthetic oligonucleotide
aaaaacctctctgtttccaa

SEQ ID NO: 2211 - DNA, 20 bp, Artificial sequence
  Synthetic oligonucleotide
gaaaaacctctctgtttcca

SEQ ID NO: 2212 - DNA, 20 bp, Artificial sequence
  Synthetic oligonucleotide
agaaaaacctctctgtttcc

SEQ ID NO: 2213 - DNA, 20 bp, Artificial sequence
  Synthetic oligonucleotide
cagaaaaacctctctgtttc

SEQ ID NO: 2214 - DNA, 20 bp, Artificial sequence
  Synthetic oligonucleotide
gtcttcagaaaaacctctct

SEQ ID NO: 2215 - DNA, 20 bp, Artificial sequence
  Synthetic oligonucleotide
tgtcttcagaaaaacctctc

SEQ ID NO: 2216 - DNA, 20 bp, Artificial sequence
  Synthetic oligonucleotide
cttgaaaaagactgtcttca

SEQ ID NO: 2217 - DNA, 20 bp, Artificial sequence
  Synthetic oligonucleotide
acttgaaaaagactgtcttc

SEQ ID NO: 2218 - DNA, 20 bp, Artificial sequence
  Synthetic oligonucleotide
aacttgaaaaagactgtctt

SEQ ID NO: 2219 - DNA, 20 bp, Artificial sequence
  Synthetic oligonucleotide
aaacttgaaaaagactgtct

SEQ ID NO: 2220 - DNA, 20 bp, Artificial sequence
  Synthetic oligonucleotide
gaaacttgaaaaagactgtc

SEQ ID NO: 2221 - DNA, 20 bp, Artificial sequence
  Synthetic oligonucleotide
agaaacttgaaaaagactgt

SEQ ID NO: 2222 - DNA, 20 bp, Artificial sequence
  Synthetic oligonucleotide
cagaaacttgaaaaagactg

SEQ ID NO: 2223 - DNA, 20 bp, Artificial sequence
  Synthetic oligonucleotide
acagaaacttgaaaaagact

SEQ ID NO: 2224 - DNA, 20 bp, Artificial sequence
  Synthetic oligonucleotide
gacagaaacttgaaaaagac

SEQ ID NO: 2225 - DNA, 20 bp, Artificial sequence
  Synthetic oligonucleotide
agacagaaacttgaaaaaga

SEQ ID NO: 2226 - DNA, 20 bp, Artificial sequence
  Synthetic oligonucleotide
aagacagaaacttgaaaaag

SEQ ID NO: 2227 - DNA, 20 bp, Artificial sequence
  Synthetic oligonucleotide
gaagacagaaacttgaaaaa

SEQ ID NO: 2228 - DNA, 20 bp, Artificial sequence
  Synthetic oligonucleotide
ggaagacagaaacttgaaaa

SEQ ID NO: 2229 - DNA, 20 bp, Artificial sequence
  Synthetic oligonucleotide
aggaagacagaaacttgaaa

SEQ ID NO: 2230 - DNA, 20 bp, Artificial sequence
  Synthetic oligonucleotide
taggaagacagaaacttgaa

SEQ ID NO: 2231 - DNA, 20 bp, Artificial sequence
  Synthetic oligonucleotide
ttaggaagacagaaacttga

SEQ ID NO: 2232 - DNA, 20 bp, Artificial sequence
  Synthetic oligonucleotide
gttaggaagacagaaacttg

SEQ ID NO: 2233 - DNA, 20 bp, Artificial sequence
  Synthetic oligonucleotide
agttaggaagacagaaactt

SEQ ID NO: 2234 - DNA, 20 bp, Artificial sequence
  Synthetic oligonucleotide
aagttaggaagacagaaact

SEQ ID NO: 2235 - DNA, 20 bp, Artificial sequence
  Synthetic oligonucleotide
aaagttaggaagacagaaac

SEQ ID NO: 2236 - DNA, 20 bp, Artificial sequence
  Synthetic oligonucleotide
aaaagttaggaagacagaaa

SEQ ID NO: 2237 - DNA, 20 bp, Artificial sequence
  Synthetic oligonucleotide
gaaaagttaggaagacagaa

SEQ ID NO: 2238 - DNA, 20 bp, Artificial sequence
  Synthetic oligonucleotide
agaaaagttaggaagacaga

SEQ ID NO: 2239 - DNA, 20 bp, Artificial sequence
  Synthetic oligonucleotide
tagaaaagttaggaagacag

SEQ ID NO: 2240 - DNA, 20 bp, Artificial sequence
  Synthetic oligonucleotide
gtagaaaagttaggaagaca

SEQ ID NO: 2241 - DNA, 20 bp, Artificial sequence
  Synthetic oligonucleotide
cgtagaaaagttaggaagac

SEQ ID NO: 2242 - DNA, 20 bp, Artificial sequence
  Synthetic oligonucleotide
acgtagaaaagttaggaaga

SEQ ID NO: 2243 - DNA, 20 bp, Artificial sequence
  Synthetic oligonucleotide
tacgtagaaaagttaggaag

SEQ ID NO: 2244 - DNA, 20 bp, Artificial sequence
  Synthetic oligonucleotide
atacgtagaaaagttaggaa

SEQ ID NO: 2245 - DNA, 20 bp, Artificial sequence
  Synthetic oligonucleotide
tatacgtagaaaagttagga

SEQ ID NO: 2246 - DNA, 20 bp, Artificial sequence
  Synthetic oligonucleotide
ttatacgtagaaaagttagg

SEQ ID NO: 2247 - DNA, 20 bp, Artificial sequence
  Synthetic oligonucleotide
tttatacgtagaaaagttag

SEQ ID NO: 2248 - DNA, 20 bp, Artificial sequence
  Synthetic oligonucleotide
gtttatacgtagaaaagtta

SEQ ID NO: 2249 - DNA, 20 bp, Artificial sequence
  Synthetic oligonucleotide
tgtttatacgtagaaaagtt

SEQ ID NO: 2250 - DNA, 20 bp, Artificial sequence
  Synthetic oligonucleotide
gtgtttatacgtagaaaagt

SEQ ID NO: 2251 - DNA, 20 bp, Artificial sequence
  Synthetic oligonucleotide
agtgtttatacgtagaaaag

SEQ ID NO: 2252 - DNA, 20 bp, Artificial sequence
  Synthetic oligonucleotide
gagtgtttatacgtagaaaa

SEQ ID NO: 2253 - DNA, 20 bp, Artificial sequence
  Synthetic oligonucleotide
agagtgtttatacgtagaaa

SEQ ID NO: 2254 - DNA, 20 bp, Artificial sequence
  Synthetic oligonucleotide
aagagtgtttatacgtagaa

SEQ ID NO: 2255 - DNA, 20 bp, Artificial sequence
  Synthetic oligonucleotide
caagagtgtttatacgtaga

SEQ ID NO: 2256 - DNA, 20 bp, Artificial sequence
  Synthetic oligonucleotide
tcaagagtgtttatacgtag

SEQ ID NO: 2257 - DNA, 20 bp, Artificial sequence
  Synthetic oligonucleotide
ttcaagagtgtttatacgta

SEQ ID NO: 2258 - DNA, 20 bp, Artificial sequence
  Synthetic oligonucleotide
attcaagagtgtttatacgt

SEQ ID NO: 2259 - DNA, 20 bp, Artificial sequence
  Synthetic oligonucleotide
tattcaagagtgtttatacg

SEQ ID NO: 2260 - DNA, 20 bp, Artificial sequence
  Synthetic oligonucleotide
ctattcaagagtgtttatac

SEQ ID NO: 2261 - DNA, 20 bp, Artificial sequence
  Synthetic oligonucleotide
tctattcaagagtgtttata

SEQ ID NO: 2262 - DNA, 20 bp, Artificial sequence
  Synthetic oligonucleotide
gtctattcaagagtgtttat

SEQ ID NO: 2263 - DNA, 20 bp, Artificial sequence
  Synthetic oligonucleotide
agtctattcaagagtgttta

SEQ ID NO: 2264 - DNA, 20 bp, Artificial sequence
  Synthetic oligonucleotide
aagtctattcaagagtgttt

SEQ ID NO: 2265 - DNA, 20 bp, Artificial sequence
  Synthetic oligonucleotide
gaagtctattcaagagtgtt

SEQ ID NO: 2266 - DNA, 20 bp, Artificial sequence
  Synthetic oligonucleotide
ggaagtctattcaagagtgt

SEQ ID NO: 2267 - DNA, 20 bp, Artificial sequence
  Synthetic oligonucleotide
tggaagtctattcaagagtg

SEQ ID NO: 2268 - DNA, 20 bp, Artificial sequence
  Synthetic oligonucleotide
agtggaagtctattcaagag

SEQ ID NO: 2269 - DNA, 20 bp, Artificial sequence
  Synthetic oligonucleotide
aagtggaagtctattcaaga

SEQ ID NO: 2270 - DNA, 20 bp, Artificial sequence
  Synthetic oligonucleotide
aaagtggaagtctattcaag

SEQ ID NO: 2271 - DNA, 20 bp, Artificial sequence
  Synthetic oligonucleotide
caaagtggaagtctattcaa

SEQ ID NO: 2272 - DNA, 20 bp, Artificial sequence
  Synthetic oligonucleotide
acaaagtggaagtctattca

SEQ ID NO: 2273 - DNA, 20 bp, Artificial sequence
  Synthetic oligonucleotide
tacaaagtggaagtctattc

SEQ ID NO: 2274 - DNA, 20 bp, Artificial sequence
  Synthetic oligonucleotide
ttacaaagtggaagtctatt

SEQ ID NO: 2275 - DNA, 20 bp, Artificial sequence
  Synthetic oligonucleotide
attacaaagtggaagtctat

SEQ ID NO: 2276 - DNA, 20 bp, Artificial sequence
  Synthetic oligonucleotide
aattacaaagtggaagtcta

SEQ ID NO: 2277 - DNA, 20 bp, Artificial sequence
  Synthetic oligonucleotide
taattacaaagtggaagtct

SEQ ID NO: 2278 - DNA, 20 bp, Artificial sequence
  Synthetic oligonucleotide
ctaattacaaagtggaagtc

SEQ ID NO: 2279 - DNA, 20 bp, Artificial sequence
  Synthetic oligonucleotide
tctaattacaaagtggaagt

SEQ ID NO: 2280 - DNA, 20 bp, Artificial sequence
  Synthetic oligonucleotide
ttctaattacaaagtggaag

SEQ ID NO: 2281 - DNA, 20 bp, Artificial sequence
  Synthetic oligonucleotide
tttctaattacaaagtggaa

SEQ ID NO: 2282 - DNA, 20 bp, Artificial sequence
  Synthetic oligonucleotide
ttttctaattacaaagtgga

SEQ ID NO: 2283 - DNA, 20 bp, Artificial sequence
  Synthetic oligonucleotide
attttctaattacaaagtgg

SEQ ID NO: 2284 - DNA, 20 bp, Artificial sequence
  Synthetic oligonucleotide
ctgtccataaaattttctaa

SEQ ID NO: 2285 - DNA, 20 bp, Artificial sequence
  Synthetic oligonucleotide
actgtccataaaattttcta

SEQ ID NO: 2286 - DNA, 20 bp, Artificial sequence
  Synthetic oligonucleotide
tactgtccataaaattttct

SEQ ID NO: 2287 - DNA, 20 bp, Artificial sequence
  Synthetic oligonucleotide
ttactgtccataaaattttc

SEQ ID NO: 2288 - DNA, 20 bp, Artificial sequence
  Synthetic oligonucleotide
cttactgtccataaaatttt

SEQ ID NO: 2289 - DNA, 20 bp, Artificial sequence
  Synthetic oligonucleotide
acttactgtccataaaattt

SEQ ID NO: 2290 - DNA, 20 bp, Artificial sequence
  Synthetic oligonucleotide
ggctttactggacttactgt

SEQ ID NO: 2291 - DNA, 20 bp, Artificial sequence
  Synthetic oligonucleotide
aggctttactggacttactg

SEQ ID NO: 2292 - DNA, 20 bp, Artificial sequence
  Synthetic oligonucleotide
aaggctttactggacttact

SEQ ID NO: 2293 - DNA, 20 bp, Artificial sequence
  Synthetic oligonucleotide
taaggctttactggacttac

SEQ ID NO: 2294 - DNA, 20 bp, Artificial sequence
  Synthetic oligonucleotide
ttaaggctttactggactta

SEQ ID NO: 2295 - DNA, 20 bp, Artificial sequence
  Synthetic oligonucleotide
cttaaggctttactggactt

SEQ ID NO: 2296 - DNA, 20 bp, Artificial sequence
  Synthetic oligonucleotide
acttaaggctttactggact

SEQ ID NO: 2297 - DNA, 20 bp, Artificial sequence
  Synthetic oligonucleotide
cacttaaggctttactggac

SEQ ID NO: 2298 - DNA, 20 bp, Artificial sequence
  Synthetic oligonucleotide
ccacttaaggctttactgga

SEQ ID NO: 2299 - DNA, 20 bp, Artificial sequence
  Synthetic oligonucleotide
ttatattctgccacttaagg

SEQ ID NO: 2300 - DNA, 20 bp, Artificial sequence
  Synthetic oligonucleotide
attatattctgccacttaag

SEQ ID NO: 2301 - DNA, 20 bp, Artificial sequence
  Synthetic oligonucleotide
aattatattctgccacttaa

SEQ ID NO: 2302 - DNA, 20 bp, Artificial sequence
  Synthetic oligonucleotide
gaattatattctgccactta

SEQ ID NO: 2303 - DNA, 20 bp, Artificial sequence
  Synthetic oligonucleotide
ggaattatattctgccactt

SEQ ID NO: 2304 - DNA, 20 bp, Artificial sequence
  Synthetic oligonucleotide
gggaattatattctgccact

SEQ ID NO: 2305 - DNA, 20 bp, Artificial sequence
  Synthetic oligonucleotide
tgggaattatattctgccac

SEQ ID NO: 2306 - DNA, 20 bp, Artificial sequence
  Synthetic oligonucleotide
ttgggaattatattctgcca

SEQ ID NO: 2307 - DNA, 20 bp, Artificial sequence
  Synthetic oligonucleotide
cttgggaattatattctgcc

SEQ ID NO: 2308 - DNA, 20 bp, Artificial sequence
  Synthetic oligonucleotide
gcttgggaattatattctgc

SEQ ID NO: 2309 - DNA, 20 bp, Artificial sequence
  Synthetic oligonucleotide
agcttgggaattatattctg

SEQ ID NO: 2310 - DNA, 20 bp, Artificial sequence
  Synthetic oligonucleotide
aagcttgggaattatattct

SEQ ID NO: 2311 - DNA, 20 bp, Artificial sequence
  Synthetic oligonucleotide
aaagcttgggaattatattc

SEQ ID NO: 2312 - DNA, 20 bp, Artificial sequence
  Synthetic oligonucleotide
aaaagcttgggaattatatt

SEQ ID NO: 2313 - DNA, 20 bp, Artificial sequence
  Synthetic oligonucleotide
caaaagcttgggaattatat

SEQ ID NO: 2314 - DNA, 20 bp, Artificial sequence
  Synthetic oligonucleotide
tatcaccctccaaaagcttg

SEQ ID NO: 2315 - DNA, 20 bp, Artificial sequence
  Synthetic oligonucleotide
atatcaccctccaaaagctt

SEQ ID NO: 2316 - DNA, 20 bp, Artificial sequence
  Synthetic oligonucleotide
tatatcaccctccaaaagct

SEQ ID NO: 2317 - DNA, 20 bp, Artificial sequence
  Synthetic oligonucleotide
ttatatcaccctccaaaagc

SEQ ID NO: 2318 - DNA, 20 bp, Artificial sequence
  Synthetic oligonucleotide
tttatatcaccctccaaaag

SEQ ID NO: 2319 - DNA, 20 bp, Artificial sequence
  Synthetic oligonucleotide
ttttatatcaccctccaaaa

SEQ ID NO: 2320 - DNA, 20 bp, Artificial sequence
  Synthetic oligonucleotide
tttttatatcaccctccaaa

SEQ ID NO: 2321 - DNA, 20 bp, Artificial sequence
  Synthetic oligonucleotide
atttttatatcaccctccaa

SEQ ID NO: 2322 - DNA, 20 bp, Artificial sequence
  Synthetic oligonucleotide
aatttttatatcaccctcca

SEQ ID NO: 2323 - DNA, 20 bp, Artificial sequence
  Synthetic oligonucleotide
aaatttttatatcaccctcc

SEQ ID NO: 2324 - DNA, 20 bp, Artificial sequence
  Synthetic oligonucleotide
taaatttttatatcaccctc

SEQ ID NO: 2325 - DNA, 20 bp, Artificial sequence
  Synthetic oligonucleotide
gtaaatttttatatcaccct

SEQ ID NO: 2326 - DNA, 20 bp, Artificial sequence
  Synthetic oligonucleotide
agtaaatttttatatcaccc

SEQ ID NO: 2327 - DNA, 20 bp, Artificial sequence
  Synthetic oligonucleotide
ctgaactgaaacaaataaaa

SEQ ID NO: 2328 - DNA, 20 bp, Artificial sequence
  Synthetic oligonucleotide
tctgaactgaaacaaataaa

SEQ ID NO: 2329 - DNA, 20 bp, Artificial sequence
  Synthetic oligonucleotide
atctgaactgaaacaaataa

SEQ ID NO: 2330 - DNA, 20 bp, Artificial sequence
  Synthetic oligonucleotide
tatctgaactgaaacaaata

SEQ ID NO: 2331 - DNA, 20 bp, Artificial sequence
  Synthetic oligonucleotide
ttatctgaactgaaacaaat

SEQ ID NO: 2332 - DNA, 20 bp, Artificial sequence
  Synthetic oligonucleotide
attatctgaactgaaacaaa

SEQ ID NO: 2333 - DNA, 20 bp, Artificial sequence
  Synthetic oligonucleotide
aattatctgaactgaaacaa

SEQ ID NO: 2334 - DNA, 20 bp, Artificial sequence
  Synthetic oligonucleotide
caattatctgaactgaaaca

SEQ ID NO: 2335 - DNA, 20 bp, Artificial sequence
  Synthetic oligonucleotide
ccaattatctgaactgaaac

SEQ ID NO: 2336 - DNA, 20 bp, Artificial sequence
  Synthetic oligonucleotide
gccaattatctgaactgaaa

SEQ ID NO: 2337 - DNA, 20 bp, Artificial sequence
  Synthetic oligonucleotide
tgccaattatctgaactgaa

SEQ ID NO: 2338 - DNA, 20 bp, Artificial sequence
  Synthetic oligonucleotide
ttgccaattatctgaactga

SEQ ID NO: 2339 - DNA, 20 bp, Artificial sequence
  Synthetic oligonucleotide
gttgccaattatctgaactg

SEQ ID NO: 2340 - DNA, 20 bp, Artificial sequence
  Synthetic oligonucleotide
agttgccaattatctgaact

SEQ ID NO: 2341 - DNA, 20 bp, Artificial sequence
  Synthetic oligonucleotide
cagttgccaattatctgaac

SEQ ID NO: 2342 - DNA, 20 bp, Artificial sequence
  Synthetic oligonucleotide
ccagttgccaattatctgaa

SEQ ID NO: 2343 - DNA, 20 bp, Artificial sequence
  Synthetic oligonucleotide
cccagttgccaattatctga

SEQ ID NO: 2344 - DNA, 20 bp, Artificial sequence
  Synthetic oligonucleotide
acccagttgccaattatctg

SEQ ID NO: 2345 - DNA, 20 bp, Artificial sequence
  Synthetic oligonucleotide
cacccagttgccaattatct

SEQ ID NO: 2346 - DNA, 20 bp, Artificial sequence
  Synthetic oligonucleotide
tcacccagttgccaattatc

SEQ ID NO: 2347 - DNA, 20 bp, Artificial sequence
  Synthetic oligonucleotide
ttcacccagttgccaattat

SEQ ID NO: 2348 - DNA, 20 bp, Artificial sequence
  Synthetic oligonucleotide
attcacccagttgccaatta

SEQ ID NO: 2349 - DNA, 20 bp, Artificial sequence
  Synthetic oligonucleotide
gattcacccagttgccaatt

SEQ ID NO: 2350 - DNA, 20 bp, Artificial sequence
  Synthetic oligonucleotide
agattcacccagttgccaat

SEQ ID NO: 2351 - DNA, 20 bp, Artificial sequence
  Synthetic oligonucleotide
cagattcacccagttgccaa

SEQ ID NO: 2352 - DNA, 20 bp, Artificial sequence
  Synthetic oligonucleotide
ccagattcacccagttgcca

SEQ ID NO: 2353 - DNA, 20 bp, Artificial sequence
  Synthetic oligonucleotide
tgccagattcacccagttgc

SEQ ID NO: 2354 - DNA, 20 bp, Artificial sequence
  Synthetic oligonucleotide
ctgccagattcacccagttg

SEQ ID NO: 2355 - DNA, 20 bp, Artificial sequence
  Synthetic oligonucleotide
cctgccagattcacccagtt

SEQ ID NO: 2356 - DNA, 20 bp, Artificial sequence
  Synthetic oligonucleotide
tcctgccagattcacccagt

SEQ ID NO: 2357 - DNA, 20 bp, Artificial sequence
  Synthetic oligonucleotide
ttcctgccagattcacccag

SEQ ID NO: 2358 - DNA, 20 bp, Artificial sequence
  Synthetic oligonucleotide
attcctgccagattcaccca

SEQ ID NO: 2359 - DNA, 20 bp, Artificial sequence
  Synthetic oligonucleotide
gattcctgccagattcaccc

SEQ ID NO: 2360 - DNA, 20 bp, Artificial sequence
  Synthetic oligonucleotide
agattcctgccagattcacc

SEQ ID NO: 2361 - DNA, 20 bp, Artificial sequence
  Synthetic oligonucleotide
tagattcctgccagattcac

SEQ ID NO: 2362 - DNA, 20 bp, Artificial sequence
  Synthetic oligonucleotide
atagattcctgccagattca

SEQ ID NO: 2363 - DNA, 20 bp, Artificial sequence
  Synthetic oligonucleotide
gatagattcctgccagattc

SEQ ID NO: 2364 - DNA, 20 bp, Artificial sequence
  Synthetic oligonucleotide
ttagttcaatggatagattc

SEQ ID NO: 2365 - DNA, 20 bp, Artificial sequence
  Synthetic oligonucleotide
tttagttcaatggatagatt

SEQ ID NO: 2366 - DNA, 20 bp, Artificial sequence
  Synthetic oligonucleotide
ttttagttcaatggatagat

SEQ ID NO: 2367 - DNA, 20 bp, Artificial sequence
  Synthetic oligonucleotide
attttagttcaatggataga

SEQ ID NO: 2368 - DNA, 20 bp, Artificial sequence
  Synthetic oligonucleotide
tattttagttcaatggatag

SEQ ID NO: 2369 - DNA, 20 bp, Artificial sequence
  Synthetic oligonucleotide
ctggttgcataataaaatta

SEQ ID NO: 2370 - DNA, 20 bp, Artificial sequence
  Synthetic oligonucleotide
actggttgcataataaaatt

SEQ ID NO: 2371 - DNA, 20 bp, Artificial sequence
  Synthetic oligonucleotide
aactggttgcataataaaat

SEQ ID NO: 2372 - DNA, 20 bp, Artificial sequence
  Synthetic oligonucleotide
aaactggttgcataataaaa

SEQ ID NO: 2373 - DNA, 20 bp, Artificial sequence
  Synthetic oligonucleotide
taaactggttgcataataaa

SEQ ID NO: 2374 - DNA, 20 bp, Artificial sequence
  Synthetic oligonucleotide
ataaactggttgcataataa

SEQ ID NO: 2375 - DNA, 20 bp, Artificial sequence
  Synthetic oligonucleotide
gataaactggttgcataata

SEQ ID NO: 2376 - DNA, 20 bp, Artificial sequence
  Synthetic oligonucleotide
ggataaactggttgcataat

SEQ ID NO: 2377 - DNA, 20 bp, Artificial sequence
  Synthetic oligonucleotide
tggataaactggttgcataa

SEQ ID NO: 2378 - DNA, 20 bp, Artificial sequence
  Synthetic oligonucleotide
gtggataaactggttgcata

SEQ ID NO: 2379 - DNA, 20 bp, Artificial sequence
  Synthetic oligonucleotide
ggtggataaactggttgcat

SEQ ID NO: 2380 - DNA, 20 bp, Artificial sequence
  Synthetic oligonucleotide
tggtggataaactggttgca

SEQ ID NO: 2381 - DNA, 20 bp, Artificial sequence
  Synthetic oligonucleotide
ttggtggataaactggttgc

SEQ ID NO: 2382 - DNA, 20 bp, Artificial sequence
  Synthetic oligonucleotide
cttggtggataaactggttg

SEQ ID NO: 2383 - DNA, 20 bp, Artificial sequence
  Synthetic oligonucleotide
tcttggtggataaactggtt

SEQ ID NO: 2384 - DNA, 20 bp, Artificial sequence
  Synthetic oligonucleotide
ttcttggtggataaactggt

SEQ ID NO: 2385 - DNA, 20 bp, Artificial sequence
  Synthetic oligonucleotide
gttcttggtggataaactgg

SEQ ID NO: 2386 - DNA, 20 bp, Artificial sequence
  Synthetic oligonucleotide
tgttcttggtggataaactg

SEQ ID NO: 2387 - DNA, 20 bp, Artificial sequence
  Synthetic oligonucleotide
atgttcttggtggataaact

SEQ ID NO: 2388 - DNA, 20 bp, Artificial sequence
  Synthetic oligonucleotide
tatgttcttggtggataaac

SEQ ID NO: 2389 - DNA, 20 bp, Artificial sequence
  Synthetic oligonucleotide
ttatgttcttggtggataaa

SEQ ID NO: 2390 - DNA, 20 bp, Artificial sequence
  Synthetic oligonucleotide
cttatgttcttggtggataa

SEQ ID NO: 2391 - DNA, 20 bp, Artificial sequence
  Synthetic oligonucleotide
tcttatgttcttggtggata

SEQ ID NO: 2392 - DNA, 20 bp, Artificial sequence
  Synthetic oligonucleotide
ttcttatgttcttggtggat

SEQ ID NO: 2393 - DNA, 20 bp, Artificial sequence
  Synthetic oligonucleotide
attcttatgttcttggtgga

SEQ ID NO: 2394 - DNA, 20 bp, Artificial sequence
  Synthetic oligonucleotide
aattcttatgttcttggtgg

SEQ ID NO: 2395 - DNA, 20 bp, Artificial sequence
  Synthetic oligonucleotide
aaattcttatgttcttggtg

SEQ ID NO: 2396 - DNA, 20 bp, Artificial sequence
  Synthetic oligonucleotide
aaaattcttatgttcttggt

SEQ ID NO: 2397 - DNA, 20 bp, Artificial sequence
  Synthetic oligonucleotide
aaaaattcttatgttcttgg

SEQ ID NO: 2398 - DNA, 20 bp, Artificial sequence
  Synthetic oligonucleotide
ccaattctttctacttataa

SEQ ID NO: 2399 - DNA, 20 bp, Artificial sequence
  Synthetic oligonucleotide
gccaattctttctacttata

SEQ ID NO: 2400 - DNA, 20 bp, Artificial sequence
  Synthetic oligonucleotide
ggccaattctttctacttat

SEQ ID NO: 2401 - DNA, 20 bp, Artificial sequence
  Synthetic oligonucleotide
tggccaattctttctactta

SEQ ID NO: 2402 - DNA, 20 bp, Artificial sequence
  Synthetic oligonucleotide
ctggccaattctttctactt

SEQ ID NO: 2403 - DNA, 20 bp, Artificial sequence
  Synthetic oligonucleotide
cctggccaattctttctact

SEQ ID NO: 2404 - DNA, 20 bp, Artificial sequence
  Synthetic oligonucleotide
gcctggccaattctttctac

SEQ ID NO: 2405 - DNA, 20 bp, Artificial sequence
  Synthetic oligonucleotide
tgcctggccaattctttcta

SEQ ID NO: 2406 - DNA, 20 bp, Artificial sequence
  Synthetic oligonucleotide
atgcctggccaattctttct

SEQ ID NO: 2407 - DNA, 20 bp, Artificial sequence
  Synthetic oligonucleotide
catgcctggccaattctttc

SEQ ID NO: 2408 - DNA, 20 bp, Artificial sequence
  Synthetic oligonucleotide
ccatgcctggccaattcttt

SEQ ID NO: 2409 - DNA, 20 bp, Artificial sequence
  Synthetic oligonucleotide
gtcttgaactcctgacctca

SEQ ID NO: 2410 - DNA, 20 bp, Artificial sequence
  Synthetic oligonucleotide
gctggtcttgaactcctgac

SEQ ID NO: 2411 - DNA, 20 bp, Artificial sequence
  Synthetic oligonucleotide
ggctggtcttgaactcctga

SEQ ID NO: 2412 - DNA, 20 bp, Artificial sequence
  Synthetic oligonucleotide
aggctggtcttgaactcctg

SEQ ID NO: 2413 - DNA, 20 bp, Artificial sequence
  Synthetic oligonucleotide
caggctggtcttgaactcct

SEQ ID NO: 2414 - DNA, 20 bp, Artificial sequence
  Synthetic oligonucleotide
atatttttagtaaagatggg

SEQ ID NO: 2415 - DNA, 20 bp, Artificial sequence
  Synthetic oligonucleotide
gtagagatgtactttatatt

SEQ ID NO: 2416 - DNA, 20 bp, Artificial sequence
  Synthetic oligonucleotide
agtagagatgtactttatat

SEQ ID NO: 2417 - DNA, 20 bp, Artificial sequence
  Synthetic oligonucleotide
tagtagagatgtactttata

SEQ ID NO: 2418 - DNA, 20 bp, Artificial sequence
  Synthetic oligonucleotide
ttagtagagatgtactttat

SEQ ID NO: 2419 - DNA, 20 bp, Artificial sequence
  Synthetic oligonucleotide
tttagtagagatgtacttta

SEQ ID NO: 2420 - DNA, 20 bp, Artificial sequence
  Synthetic oligonucleotide
ttttagtagagatgtacttt

SEQ ID NO: 2421 - DNA, 20 bp, Artificial sequence
  Synthetic oligonucleotide
tttttagtagagatgtactt

SEQ ID NO: 2422 - DNA, 20 bp, Artificial sequence
  Synthetic oligonucleotide
atttttagtagagatgtact

SEQ ID NO: 2423 - DNA, 20 bp, Artificial sequence
  Synthetic oligonucleotide
tatttttagtagagatgtac

SEQ ID NO: 2424 - DNA, 20 bp, Artificial sequence
  Synthetic oligonucleotide
gtatttttagtagagatgta

SEQ ID NO: 2425 - DNA, 20 bp, Artificial sequence
  Synthetic oligonucleotide
cgtatttttagtagagatgt

SEQ ID NO: 2426 - DNA, 20 bp, Artificial sequence
  Synthetic oligonucleotide
tcgtatttttagtagagatg

SEQ ID NO: 2427 - DNA, 20 bp, Artificial sequence
  Synthetic oligonucleotide
ttcgtatttttagtagagat

SEQ ID NO: 2428 - DNA, 20 bp, Artificial sequence
  Synthetic oligonucleotide
tttcgtatttttagtagaga

SEQ ID NO: 2429 - DNA, 20 bp, Artificial sequence
  Synthetic oligonucleotide
ttttcgtatttttagtagag

SEQ ID NO: 2430 - DNA, 20 bp, Artificial sequence
  Synthetic oligonucleotide
accatgcccagctaattttt

SEQ ID NO: 2431 - DNA, 20 bp, Artificial sequence
  Synthetic oligonucleotide
caccatgcccagctaatttt

SEQ ID NO: 2432 - DNA, 20 bp, Artificial sequence
  Synthetic oligonucleotide
ccaccatgcccagctaattt

SEQ ID NO: 2433 - DNA, 20 bp, Artificial sequence
  Synthetic oligonucleotide
gccaccatgcccagctaatt

SEQ ID NO: 2434 - DNA, 20 bp, Artificial sequence
  Synthetic oligonucleotide
aagagattctcctgcctcag

SEQ ID NO: 2435 - DNA, 20 bp, Artificial sequence
  Synthetic oligonucleotide
caagagattctcctgcctca

SEQ ID NO: 2436 - DNA, 20 bp, Artificial sequence
  Synthetic oligonucleotide
tcaagagattctcctgcctc

SEQ ID NO: 2437 - DNA, 20 bp, Artificial sequence
  Synthetic oligonucleotide
ttcaagagattctcctgcct

SEQ ID NO: 2438 - DNA, 20 bp, Artificial sequence
  Synthetic oligonucleotide
gttcaagagattctcctgcc

SEQ ID NO: 2439 - DNA, 20 bp, Artificial sequence
  Synthetic oligonucleotide
ggttcaagagattctcctgc

SEQ ID NO: 2440 - DNA, 20 bp, Artificial sequence
  Synthetic oligonucleotide
aggttcaagagattctcctg

SEQ ID NO: 2441 - DNA, 20 bp, Artificial sequence
  Synthetic oligonucleotide
caggttcaagagattctcct

SEQ ID NO: 2442 - DNA, 20 bp, Artificial sequence
  Synthetic oligonucleotide
ccaggttcaagagattctcc

SEQ ID NO: 2443 - DNA, 20 bp, Artificial sequence
  Synthetic oligonucleotide
cccaggttcaagagattctc

SEQ ID NO: 2444 - DNA, 20 bp, Artificial sequence
  Synthetic oligonucleotide
tcccaggttcaagagattct

SEQ ID NO: 2445 - DNA, 20 bp, Artificial sequence
  Synthetic oligonucleotide
ctcccaggttcaagagattc

SEQ ID NO: 2446 - DNA, 20 bp, Artificial sequence
  Synthetic oligonucleotide
cctcccaggttcaagagatt

SEQ ID NO: 2447 - DNA, 20 bp, Artificial sequence
  Synthetic oligonucleotide
gcctcccaggttcaagagat

SEQ ID NO: 2448 - DNA, 20 bp, Artificial sequence
  Synthetic oligonucleotide
gacgtgatctcggctcattg

SEQ ID NO: 2449 - DNA, 20 bp, Artificial sequence
  Synthetic oligonucleotide
agtgcagtgacgtgatctcg

SEQ ID NO: 2450 - DNA, 20 bp, Artificial sequence
  Synthetic oligonucleotide
gagtgcagtgacgtgatctc

SEQ ID NO: 2451 - DNA, 20 bp, Artificial sequence
  Synthetic oligonucleotide
ggagtgcagtgacgtgatct

SEQ ID NO: 2452 - DNA, 20 bp, Artificial sequence
  Synthetic oligonucleotide
tggagtgcagtgacgtgatc

SEQ ID NO: 2453 - DNA, 20 bp, Artificial sequence
  Synthetic oligonucleotide
ctggagtgcagtgacgtgat

SEQ ID NO: 2454 - DNA, 20 bp, Artificial sequence
  Synthetic oligonucleotide
aagctggagtgcagtgacgt

SEQ ID NO: 2455 - DNA, 20 bp, Artificial sequence
  Synthetic oligonucleotide
tcttgctctgttgcccaagc

SEQ ID NO: 2456 - DNA, 20 bp, Artificial sequence
  Synthetic oligonucleotide
gtcttgctctgttgcccaag

SEQ ID NO: 2457 - DNA, 20 bp, Artificial sequence
  Synthetic oligonucleotide
agtcttgctctgttgcccaa

SEQ ID NO: 2458 - DNA, 20 bp, Artificial sequence
  Synthetic oligonucleotide
ttttgagatggagtcttgct

SEQ ID NO: 2459 - DNA, 20 bp, Artificial sequence
  Synthetic oligonucleotide
tttttgagatggagtcttgc

SEQ ID NO: 2460 - DNA, 20 bp, Artificial sequence
  Synthetic oligonucleotide
gcttgataattctatttctt

SEQ ID NO: 2461 - DNA, 20 bp, Artificial sequence
  Synthetic oligonucleotide
agcttgataattctatttct

SEQ ID NO: 2462 - DNA, 20 bp, Artificial sequence
  Synthetic oligonucleotide
aagcttgataattctatttc

SEQ ID NO: 2463 - DNA, 20 bp, Artificial sequence
  Synthetic oligonucleotide
ctagtttttaaaagcttgat

SEQ ID NO: 2464 - DNA, 20 bp, Artificial sequence
  Synthetic oligonucleotide
tctagtttttaaaagcttga

SEQ ID NO: 2465 - DNA, 20 bp, Artificial sequence
  Synthetic oligonucleotide
ctctagtttttaaaagcttg

SEQ ID NO: 2466 - DNA, 20 bp, Artificial sequence
  Synthetic oligonucleotide
gctctagtttttaaaagctt

SEQ ID NO: 2467 - DNA, 20 bp, Artificial sequence
  Synthetic oligonucleotide
tgctctagtttttaaaagct

SEQ ID NO: 2468 - DNA, 20 bp, Artificial sequence
  Synthetic oligonucleotide
gtgctctagtttttaaaagc

SEQ ID NO: 2469 - DNA, 20 bp, Artificial sequence
  Synthetic oligonucleotide
tgtgctctagtttttaaaag

SEQ ID NO: 2470 - DNA, 20 bp, Artificial sequence
  Synthetic oligonucleotide
ctgtgctctagtttttaaaa

SEQ ID NO: 2471 - DNA, 20 bp, Artificial sequence
  Synthetic oligonucleotide
tctgtgctctagtttttaaa

SEQ ID NO: 2472 - DNA, 20 bp, Artificial sequence
  Synthetic oligonucleotide
ttctgtgctctagtttttaa

SEQ ID NO: 2473 - DNA, 20 bp, Artificial sequence
  Synthetic oligonucleotide
cttctgtgctctagttttta

SEQ ID NO: 2474 - DNA, 20 bp, Artificial sequence
  Synthetic oligonucleotide
ccttctgtgctctagttttt

SEQ ID NO: 2475 - DNA, 20 bp, Artificial sequence
  Synthetic oligonucleotide
tccttctgtgctctagtttt

SEQ ID NO: 2476 - DNA, 20 bp, Artificial sequence
  Synthetic oligonucleotide
ttccttctgtgctctagttt

SEQ ID NO: 2477 - DNA, 20 bp, Artificial sequence
  Synthetic oligonucleotide
attccttctgtgctctagtt

SEQ ID NO: 2478 - DNA, 20 bp, Artificial sequence
  Synthetic oligonucleotide
tattccttctgtgctctagt

SEQ ID NO: 2479 - DNA, 20 bp, Artificial sequence
  Synthetic oligonucleotide
ttattccttctgtgctctag

SEQ ID NO: 2480 - DNA, 20 bp, Artificial sequence
  Synthetic oligonucleotide
cttattccttctgtgctcta

SEQ ID NO: 2481 - DNA, 20 bp, Artificial sequence
  Synthetic oligonucleotide
ccttattccttctgtgctct

SEQ ID NO: 2482 - DNA, 20 bp, Artificial sequence
  Synthetic oligonucleotide
accttattccttctgtgctc

SEQ ID NO: 2483 - DNA, 20 bp, Artificial sequence
  Synthetic oligonucleotide
gaccttattccttctgtgct

SEQ ID NO: 2484 - DNA, 20 bp, Artificial sequence
  Synthetic oligonucleotide
tgaccttattccttctgtgc

SEQ ID NO: 2485 - DNA, 20 bp, Artificial sequence
  Synthetic oligonucleotide
atgaccttattccttctgtg

SEQ ID NO: 2486 - DNA, 20 bp, Artificial sequence
  Synthetic oligonucleotide
catgaccttattccttctgt

SEQ ID NO: 2487 - DNA, 20 bp, Artificial sequence
  Synthetic oligonucleotide
tcatgaccttattccttctg

SEQ ID NO: 2488 - DNA, 20 bp, Artificial sequence
  Synthetic oligonucleotide
ttcatgaccttattccttct

SEQ ID NO: 2489 - DNA, 20 bp, Artificial sequence
  Synthetic oligonucleotide
tttcatgaccttattccttc

SEQ ID NO: 2490 - DNA, 20 bp, Artificial sequence
  Synthetic oligonucleotide
atttcatgaccttattcctt

SEQ ID NO: 2491 - DNA, 20 bp, Artificial sequence
  Synthetic oligonucleotide
aatttcatgaccttattcct

SEQ ID NO: 2492 - DNA, 20 bp, Artificial sequence
  Synthetic oligonucleotide
aaatttcatgaccttattcc

SEQ ID NO: 2493 - DNA, 20 bp, Artificial sequence
  Synthetic oligonucleotide
taaatttcatgaccttattc

SEQ ID NO: 2494 - DNA, 20 bp, Artificial sequence
  Synthetic oligonucleotide
cttttaaatttcatgacctt

SEQ ID NO: 2495 - DNA, 20 bp, Artificial sequence
  Synthetic oligonucleotide
ccttttaaatttcatgacct

SEQ ID NO: 2496 - DNA, 20 bp, Artificial sequence
  Synthetic oligonucleotide
accttttaaatttcatgacc

SEQ ID NO: 2497 - DNA, 20 bp, Artificial sequence
  Synthetic oligonucleotide
aaccttttaaatttcatgac

SEQ ID NO: 2498 - DNA, 20 bp, Artificial sequence
  Synthetic oligonucleotide
ctatgacaatatttaacctt

SEQ ID NO: 2499 - DNA, 20 bp, Artificial sequence
  Synthetic oligonucleotide
cctatgacaatatttaacct

SEQ ID NO: 2500 - DNA, 20 bp, Artificial sequence
  Synthetic oligonucleotide
tcctatgacaatatttaacc

SEQ ID NO: 2501 - DNA, 20 bp, Artificial sequence
  Synthetic oligonucleotide
atcctatgacaatatttaac

SEQ ID NO: 2502 - DNA, 20 bp, Artificial sequence
  Synthetic oligonucleotide
cttaatcctatgacaatatt

SEQ ID NO: 2503 - DNA, 20 bp, Artificial sequence
  Synthetic oligonucleotide
gcttaatcctatgacaatat

SEQ ID NO: 2504 - DNA, 20 bp, Artificial sequence
  Synthetic oligonucleotide
tgcttaatcctatgacaata

SEQ ID NO: 2505 - DNA, 20 bp, Artificial sequence
  Synthetic oligonucleotide
ctgcttaatcctatgacaat

SEQ ID NO: 2506 - DNA, 20 bp, Artificial sequence
  Synthetic oligonucleotide
actgcttaatcctatgacaa

SEQ ID NO: 2507 - DNA, 20 bp, Artificial sequence
  Synthetic oligonucleotide
aactgcttaatcctatgaca

SEQ ID NO: 2508 - DNA, 20 bp, Artificial sequence
  Synthetic oligonucleotide
aaactgcttaatcctatgac

SEQ ID NO: 2509 - DNA, 20 bp, Artificial sequence
  Synthetic oligonucleotide
taaactgcttaatcctatga

SEQ ID NO: 2510 - DNA, 20 bp, Artificial sequence
  Synthetic oligonucleotide
ttaaactgcttaatcctatg

SEQ ID NO: 2511 - DNA, 20 bp, Artificial sequence
  Synthetic oligonucleotide
tttaaactgcttaatcctat

SEQ ID NO: 2512 - DNA, 20 bp, Artificial sequence
  Synthetic oligonucleotide
ctttaaactgcttaatccta

SEQ ID NO: 2513 - DNA, 20 bp, Artificial sequence
  Synthetic oligonucleotide
tctttaaactgcttaatcct

SEQ ID NO: 2514 - DNA, 20 bp, Artificial sequence
  Synthetic oligonucleotide
atctttaaactgcttaatcc

SEQ ID NO: 2515 - DNA, 20 bp, Artificial sequence
  Synthetic oligonucleotide
aatctttaaactgcttaatc

SEQ ID NO: 2516 - DNA, 20 bp, Artificial sequence
  Synthetic oligonucleotide
caatctttaaactgcttaat

SEQ ID NO: 2517 - DNA, 20 bp, Artificial sequence
  Synthetic oligonucleotide
acaatctttaaactgcttaa

SEQ ID NO: 2518 - DNA, 20 bp, Artificial sequence
  Synthetic oligonucleotide
aacaatctttaaactgctta

SEQ ID NO: 2519 - DNA, 20 bp, Artificial sequence
  Synthetic oligonucleotide
caacaatctttaaactgctt

SEQ ID NO: 2520 - DNA, 20 bp, Artificial sequence
  Synthetic oligonucleotide
ccaacaatctttaaactgct

SEQ ID NO: 2521 - DNA, 20 bp, Artificial sequence
  Synthetic oligonucleotide
tccaacaatctttaaactgc

SEQ ID NO: 2522 - DNA, 20 bp, Artificial sequence
  Synthetic oligonucleotide
atccaacaatctttaaactg

SEQ ID NO: 2523 - DNA, 20 bp, Artificial sequence
  Synthetic oligonucleotide
catccaacaatctttaaact

SEQ ID NO: 2524 - DNA, 20 bp, Artificial sequence
  Synthetic oligonucleotide
tcatccaacaatctttaaac

SEQ ID NO: 2525 - DNA, 20 bp, Artificial sequence
  Synthetic oligonucleotide
ttcatccaacaatctttaaa

SEQ ID NO: 2526 - DNA, 20 bp, Artificial sequence
  Synthetic oligonucleotide
tttcatccaacaatctttaa

SEQ ID NO: 2527 - DNA, 20 bp, Artificial sequence
  Synthetic oligonucleotide
atttcatccaacaatcttta

SEQ ID NO: 2528 - DNA, 20 bp, Artificial sequence
  Synthetic oligonucleotide
aatttcatccaacaatcttt

SEQ ID NO: 2529 - DNA, 20 bp, Artificial sequence
  Synthetic oligonucleotide
taatttcatccaacaatctt

SEQ ID NO: 2530 - DNA, 20 bp, Artificial sequence
  Synthetic oligonucleotide
ataatttcatccaacaatct

SEQ ID NO: 2531 - DNA, 20 bp, Artificial sequence
  Synthetic oligonucleotide
aataatttcatccaacaatc

SEQ ID NO: 2532 - DNA, 20 bp, Artificial sequence
  Synthetic oligonucleotide
caaataatttcatccaacaa

SEQ ID NO: 2533 - DNA, 20 bp, Artificial sequence
  Synthetic oligonucleotide
acaaataatttcatccaaca

SEQ ID NO: 2534 - DNA, 20 bp, Artificial sequence
  Synthetic oligonucleotide
gacaaataatttcatccaac

SEQ ID NO: 2535 - DNA, 20 bp, Artificial sequence
  Synthetic oligonucleotide
tgacaaataatttcatccaa

SEQ ID NO: 2536 - DNA, 20 bp, Artificial sequence
  Synthetic oligonucleotide
atgacaaataatttcatcca

SEQ ID NO: 2537 - DNA, 20 bp, Artificial sequence
  Synthetic oligonucleotide
aatgacaaataatttcatcc

SEQ ID NO: 2538 - DNA, 20 bp, Artificial sequence
  Synthetic oligonucleotide
gaatgacaaataatttcatc

SEQ ID NO: 2539 - DNA, 20 bp, Artificial sequence
  Synthetic oligonucleotide
cttgaatgaatgacaaataa

SEQ ID NO: 2540 - DNA, 20 bp, Artificial sequence
  Synthetic oligonucleotide
acttgaatgaatgacaaata

SEQ ID NO: 2541 - DNA, 20 bp, Artificial sequence
  Synthetic oligonucleotide
tacttgaatgaatgacaaat

SEQ ID NO: 2542 - DNA, 20 bp, Artificial sequence
  Synthetic oligonucleotide
ttacttgaatgaatgacaaa

SEQ ID NO: 2543 - DNA, 20 bp, Artificial sequence
  Synthetic oligonucleotide
attacttgaatgaatgacaa

SEQ ID NO: 2544 - DNA, 20 bp, Artificial sequence
  Synthetic oligonucleotide
tattacttgaatgaatgaca

SEQ ID NO: 2545 - DNA, 20 bp, Artificial sequence
  Synthetic oligonucleotide
ttattacttgaatgaatgac
